(19) United States
(12) Patent Application Publication
(10) Pub. No.: US 2022/0170057 A1
(43) Pub. Date: Jun. 2, 2022

(54) MICROORGANISMS AND METHODS FOR THE FERMENTATION OF CANNABINOIDS

(71) Applicant: ELESZTO GENETIKA, INC., Budapest (HU)

(72) Inventors: Bela Krisztian SZAMECZ, Budapest (HU); Szilvia VARSZEGI, Kalosca (HU); Attila NEMETH, Budapest (HU); Lorand SZABO, Szentendre (HU)

(21) Appl. No.: 17/594,266

(22) PCT Filed: Apr. 11, 2020
(86) PCT No.: PCT/IB2020/000241

§ 371 Date: Oct. 8, 2021

Related U.S. Application Data
(60) Provisional application No. 62/832,852, filed on Apr. 11, 2019.
(60) Provisional application No. 62/861,667, filed on Jun. 14, 2019.
(60) Provisional application No. 62/861,992, filed on Jun. 14, 2019.
(60) Provisional application No. 62/899,378, filed on Sep. 12, 2019.

(51) Int. Cl. C12P 7/42; C12N 1/18; C12N 15/52; C12N 9/02; C12N 9/10; C12P 7/22

(52) U.S. Cl. CPC C12P 7/42; C12N 1/18; C12N 15/52; C12N 9/001; C12N 9/1029; C12N 9/1085; C12Y 205/0101; C12Y 103/03006; C12Y 121/03007; C12Y 121/03008; C12Y 203/01206; C12Y 205/01102; C12P 7/22

(57) ABSTRACT

Disclosed herein are microorganism and methods that can be used for the synthesis of cannabigerolic acid (CBGA) and cannabinoids. The methods disclosed can be used to produce CBGA, Δ⁹-tetrahydrocannabinolic acid (THCA), cannabidiolic acid (CBDA), cannabichromenic acid (CBGA), Δ⁹-tetrahydrocannabivarinic acid (THCVA), cannabidivarinic acid (CBDVA), cannabichromevarinic acid (CBCVA), Δ⁹-tetrahydrocannabinol (THC), cannabidiol (CBD), cannabichromene (CBC). Enzymes useful for the synthesis of CBGA and cannabinoids, include but are not limited to acyl activating enzyme (AAE1), polyketide synthase (PKS), olivetolic acid cyclase (OAC), prenyltransferase (PT), THCA synthase (THCAS), CBDA synthase (CBDAS), CBC A synthase (CBCAS), HMG-Co reductase (HMG1), and/or famesyl pyrophosphate synthetase (ERG20). The microorganisms can also have one or more genes disrupted, such as gene that that controls beta oxidation of long chain fatty acids.

### CROSS-REFERENCE TO RELATED APPLICATIONS

[0001] This application claims priority to U.S. Provisional Patent Application No. 62/899,378, filed Sep. 12, 2019, U.S. Provisional Patent Application No. 62/861,992, filed Jun. 14, 2019, U.S. Provisional Patent Application No. 62/861,667, filed Jun. 14, 2019, and U.S. Provisional Patent Application No. 62/832,852, filed Apr. 11, 2019, all of which are incorporated herein by reference in their entireties.

### SEQUENCE LISTING

[0002] The instant application contains a Sequence Listing which has been submitted electronically in ASCII format and is hereby incorporated by reference in its entirety. Said ASCII file, created on Apr. 10, 2020, is named 35066-002WO_SL.txt and is 1,684,311 bytes in size.

### BACKGROUND OF THE DISCLOSURE

[0003] Cannabis sativa (marijuana, hemp; Cannabaceae) is a medicinal and psychoactive herbal drug. Its unique effects are believed to be caused by cannabinoids, which include Δ⁹-tetrahydrocannabinol (THC) and more than 80 related metabolites. Medical marijuana and cannabinoid drugs are increasingly used to treat a range of diseases and conditions such as multiple sclerosis and chronic pain.

[0004] Currently, the production of cannabinoids for pharmaceutical or other use is through the extraction of cannabinoids from plants, for example Cannabis sativa, or by chemical synthesis.

[0005] There are several drawbacks of the natural production and extraction of cannabinoids from plants. It is often difficult to reproduce identical cannabinoid profiles in plants using an extraction process. In addition, extraction from Cannabis sativa produces a mixture of cannabinoids, which can be difficult to purify to provide a single compound needed for pharmaceutical applications.

[0006] The chemical synthesis of various cannabinoids is a costly process compared to extraction, but it provides the final product as single pure product, which is often required for pharmaceutical use.

[0007] The microbial fermentation-based production of cannabigerolic acid (“CBGA”) or cannabinoids can be more economical, more robust, scalable, and can provide specific cannabinoid products for simplified isolation and purification versus current routes.

[0008] There are some known microbial fermentation processes. For example, WO 2016/010827 A1 and WO 2011/017798 A1 describe several processes. However, attempts at reproducing the methods disclosed therein, were unsuccessful: CBGA was not produced.

[0009] The methods described in WO 2019/071000 A1, incorporated herein by reference, were successful at producing CGBA, however higher titers of CBGA and various cannabinoids are desired. The inventors have discovered ways to produce cannabinoids as described herein.

### INCORPORATION BY REFERENCE

[0010] All publications, patents, and patent applications herein are incorporated by reference in their entireties to the same extent as if each individual publication, patent, or patent application was specifically and individually indicated to be incorporated by reference in its entirety. In the event of a conflict between a term herein and a term in an incorporated reference, the term herein controls.

### SUMMARY

[0011] This application discloses microorganisms that are capable of producing CBGA and cannabinoids (e.g., THC), in an efficient manner, as well as methods of increasing the efficiency of CBGA and cannabinoid, cannabinoid intermediate, or cannabinoid precursor synthesis (“cannabinoid,” “cannabinoid intermediate,” and “cannabinoid precursor” used interchangibly herein). The products that can be made by the processes and microorganism described herein can include, but are not limited to CBGA, Δ⁹-tetrahydrocannabinolic acid (THCA), cannabidiolic acid (CBDA), cannabichromenic acid (CBCA), Δ⁹-tetrahydrocannabinol (THC), cannabidiol (CBD), cannabichromene (CBC), Δ⁹-tetrahydrocannabivarinic acid (THCVA), cannabidivarinic acid (CBDVA), and cannabichromevarinic acid (CBCVA), as described in WO 2019/071000 (herein incorporated by reference) and as described herein. In some cases, a combination of mutants, deletions and yeast strains may be used as described or in various combinations.

[0012] In an embodiment a genetically modified microorganism comprises at least three polynucleotides that encode for: a) an amino acid sequence that is substantially identical, at least about 75% identical, at least about 80% identical, at least about 85% identical, at least about 90% identical, at least about 91% identical, at least about 92% identical, at least about 93% identical, at least about 94% identical, at least about 95% identical, at least about 96% identical, at least about 97% identical, at least about 98% identical, or at least about 99% identical to SEQ ID NO: 27; b) an amino acid sequence that is substantially identical, at least about 75% identical, at least about 80% identical, at least about 85% identical, at least about 90% identical, at least about 91% identical, at least about 92% identical, at least about 93% identical, at least about 94% identical, at least about 95% identical, at least about 96% identical, at least about 97% identical, at least about 98% identical, or at least about 99% identical to SEQ ID NO: 32; or c) combinations thereof. In an embodiment, the genetically modified microorganism of claim 1 comprises a polynucleotide that encodes for an amino acid sequence that is substantially identical, at least about 75% identical, at least about 80% identical, at least about 85% identical, at least about 90% identical, at least about 91% identical, at least about 92% identical, at least about 93% identical, at least about 94% identical, at least about 95% identical, at least about 96% identical, at least about 97% identical, at least about 98% identical, or at least about 99% identical to SEQ ID NO: 27. In an embodiment, the genetically modified microorganism comprises a polynucleotide that encodes for an amino acid sequence that is substantially identical, at least about 75% identical, at least about 80% identical, at least about 85% identical, at least about 90% identical, at least about 91% identical, at least about 92% identical, at least about 93% identical, at least about 94% identical, at least about 95% identical, at least about 96% identical, at least about 97% identical, at least about 98% identical, or at least about 99% identical to SEQ ID NO: 32.

[0013] In an embodiment, the genetically modified microorganism comprises at least two polynucleotides that encode for an amino acid sequence that is substantially identical, at least about 75% identical, at least about 80% identical, at least about 85% identical, at least about 90% identical, at least about 91% identical, at least about 92% identical, at least about 93% identical, at least about 94% identical, at least about 95% identical, at least about 96% identical, at least about 97% identical, at least about 98% identical, or at least about 99% identical to SEQ ID NO: 32.

[0014] In an embodiment, the at least three polynucleotides encode for proteins having prenyltransferase activity.

[0015] In an embodiment, the microorganism comprises at least one polynucleotide that encodes a F96W mutant of Saccharomyces cerevisiae ERG20. In an embodiment, the microorganism comprises at least one polynucleotide that encodes an N127W mutant of Saccharomyces cerevisiae ERG20. In an embodiment, at least one of the microorganism's engodenous genes is disrupted; preferably wherein the engodenous genes is deleted. In an embodiment, the microorganism further comprises the polynucleotide sequence of the Saccharomyces cerevisiae GAL1/GAL10 promoter. In an embodiment, the GAL1/GAL10 promoter is inserted into the microorganism's native LPP1 locus. In an embodiment, the microorganism's native LPP1 open reading frame is deleted. In an embodiment, the microorganism further comprises at least one polynucleotide that encodes for an amino acid sequence that is substantially identical to a truncated amino acid sequence of the Saccharomyces cerevisiae HMG1, wherein the first 530 amino acids of the HMG1 are truncated.

[0016] In an embodiment, the genetically modified microorganism further comprises at least one polynucleotide encoding at least one polypeptide with acyl activating activity; polyketide synthase activity; olivetol synthase activity; tetraketide synthase activity; olivetolic acid cyclase activity; THCA synthase activity; CBDA synthase activity; CBCA synthase activity; HMG-Co reductase activity; farnesyl pyrophosphate synthetase activity; or any combination thereof. In an embodiment, the genetically modified microorganism further comprises at least one polynucleotide encoding an acyl activating enzyme (AAE1); a polyketide synthase (PKS), such as a tetraketide synthase (TKS); an olivetolic acid cyclase (OAC); a THCA synthase (THCAS); a CBDA synthase (CBDAS); a CBCA synthase (CBCAS); a HMG-Co reductase (HMG1); a farnesyl pyrophosphate synthetase (ERG20); or any combination thereof; preferably wherein the AAE1 is substantially identical, at least about 75% identical, at least about 80% identical, at least about 85% identical, at least about 90% identical, at least about 91% identical, at least about 92% identical, at least about 93% identical, at least about 94% identical, at least about 95% identical, at least about 96% identical, at least about 97% identical, at least about 98% identical, or at least about 99% identical to SEQ ID NO: 14; preferably wherein the TKS is substantially identical, at least about 75% identical, at least about 80% identical, at least about 85% identical, at least about 90% identical, at least about 91% identical, at least about 92% identical, at least about 93% identical, at least about 94% identical, at least about 95% identical, at least about 96% identical, at least about 97% identical, at least about 98% identical, or at least about 99% identical to SEQ ID NO: 41; preferably wherein the OAC is substantially identical, at least about 75% identical, at least about 80% identical, at least about 85% identical, at least about 90% identical, at least about 91% identical, at least about 92% identical, at least about 93% identical, at least about 94% identical, at least about 95% identical, at least about 96% identical, at least about 97% identical, at least about 98% identical, or at least about 99% identical to SEQ ID NO: 8; preferably wherein the THCAS is substantially identical, at least about 75% identical, at least about 80% identical, at least about 85% identical, at least about 90% identical, at least about 91% identical, at least about 92% identical, at least about 93% identical, at least about 94% identical, at least about 95% identical, at least about 96% identical, at least about 97% identical, at least about 98% identical, or at least about 99% identical to a sequence chosen from SEQ ID NO: 10 or SEQ ID NO: 120; preferably wherein the THCAS is a T446A mutant of SEQ ID NO: 120, a T446V mutant of SEQ ID NO: 120, or a T446I mutant of SEQ ID NO: 120, or a combination thereof; preferably wherein the polynucleotide encodes a THCAS signal sequence substantially identical to, at least about 75% identical, at least about 80% identical, at least about 85% identical, at least about 90% identical, at least about 91% identical, at least about 92% identical, at least about 93% identical, at least about 94% identical, at least about 95% identical, at least about 96% identical, at least about 97% identical, at least about 98% identical, or at least about 99% identical to a sequence chosen from SEQ ID NO: 121 to SEQ ID NO: 138; preferably wherein the CBDAS is substantially identical, at least about 75% identical, at least about 80% identical, at least about 85% identical, at least about 90% identical, at least about 91% identical, at least about 92% identical, at least about 93% identical, at least about 94% identical, at least about 95% identical, at least about 96% identical, at least about 97% identical, at least about 98% identical, or at least about 99% identical to SEQ ID NO: 12; preferably wherein the CBCAS is substantially identical, at least about 75% identical, at least about 80% identical, at least about 85% identical, at least about 90% identical, at least about 91% identical, at least about 92% identical, at least about 93% identical, at least about 94% identical, at least about 95% identical, at least about 96% identical, at least about 97% identical, at least about 98% identical, or at least about 99% identical to SEQ ID NO: 18; preferably wherein the HMG1 is substantially identical, at least about 75% identical, at least about 80% identical, at least about 85% identical, at least about 90% identical, at least about 91% identical, at least about 92% identical, at least about 93% identical, at least about 94% identical, at least about 95% identical, at least about 96% identical, at least about 97% identical, at least about 98% identical, or at least about 99% identical to SEQ ID NO: 20 or SEQ ID NO: 22; preferably wherein the ERG20 is substantially identical, at least about 75% identical, at least about 80% identical, at least about 85% identical, at least about 90% identical, at least about 91% identical, at least about 92% identical, at least about 93% identical, at least about 94% identical, at least about 95% identical, at least about 96% identical, at least about 97% identical, at least about 98% identical, or at least about 99% identical to SEQ ID NO: 24.

[0017] In an embodiment, the genetically modified microorganism comprises at least one polynucleotide encoding an enzyme that is capable of converting olivetolic acid to cannabigerolic acid (“CBGA”). In an embodiment, the genetically modified microorganism further comprises at least one polynucleotide encoding an enzyme that is capable of converting butyric acid to cannabigerolic acid (“CBGVA”).

[0018] In an embodiment, the genetically modified microorganism further comprises a polynucleotide that encodes for an amino acid sequence that is substantially identical to, at least about 75% identical, at least about 80% identical, at least about 85% identical, at least about 90% identical, at least about 91% identical, at least about 92% identical, at least about 93% identical, at least about 94% identical, at least about 95% identical, at least about 96% identical, at least about 97% identical, at least about 98% identical, or at least about 99% identical to SEQ ID NO: 5.

[0019] In an embodiment, the genetically modified microorganism further comprises a polynucleotide that is substantially identical to, at least about 75% identical, at least about 80% identical, at least about 85% identical, at least about 90% identical, at least about 91% identical, at least about 92% identical, at least about 93% identical, at least about 94% identical, at least about 95% identical, at least about 96% identical, at least about 97% identical, at least about 98% identical, or at least about 99% identical to SEQ ID NO: 6.

[0020] In an embodiment, the genetically modified microorganism further comprises a polynucleotide that encodes for an amino acid sequence that is substantially identical to, at least about 75% identical, at least about 80% identical, at least about 85% identical, at least about 90% identical, at least about 91% identical, at least about 92% identical, at least about 93% identical, at least about 94% identical, at least about 95% identical, at least about 96% identical, at least about 97% identical, at least about 98% identical, or at least about 99% identical to SEQ ID NO: 7.

[0021] In an embodiment, the genetically modified microorganism further comprises a polynucleotide that is substantially identical to, at least about 75% identical, at least about 80% identical, at least about 85% identical, at least about 90% identical, at least about 91% identical, at least about 92% identical, at least about 93% identical, at least about 94% identical, at least about 95% identical, at least about 96% identical, at least about 97% identical, at least about 98% identical, or at least about 99% identical to SEQ ID NO:8.

[0022] In an embodiment, the genetically modified microorganism further comprises a polynucleotide that encodes for an amino acid sequence that is substantially identical to, at least about 75% identical, at least about 80% identical, at least about 85% identical, at least about 90% identical, at least about 91% identical, at least about 92% identical, at least about 93% identical, at least about 94% identical, at least about 95% identical, at least about 96% identical, at least about 97% identical, at least about 98% identical, or at least about 99% identical to SEQ ID NO: 13.

[0023] In an embodiment, the genetically modified microorganism further comprises a polynucleotide that is substantially identical to, at least about 75% identical, at least about 80% identical, at least about 85% identical, at least about 90% identical, at least about 91% identical, at least about 92% identical, at least about 93% identical, at least about 94% identical, at least about 95% identical, at least about 96% identical, at least about 97% identical, at least about 98% identical, or at least about 99% identical to SEQ ID NO:14.

[0024] In an embodiment, the genetically modified microorganism comprises at least two polynucleotides encoding a protein with AAE1 activity. In an embodiment, the genetically modified microorganism comprises at least three polynucleotides encoding a protein with AAE1 activity. In an embodiment, genetically modified microorganism comprises at least two polynucleotides encoding a protein with TKS activity. In an embodiment, the genetically modified microorganism comprises at least three polynucleotides encoding a protein with TKS activity. In an embodiment, the genetically modified microorganism comprises at least two polynucleotides encoding a protein with OAC activity. In an embodiment, the genetically modified microorganism comprises at least three polynucleotides encoding a protein with OAC activity. In an embodiment, the genetically modified microorganism comprises at least three polynucleotides encoding a protein with AAE1 activity; at least three polynucleotides encoding a protein with TKS activity; and at least three polynucleotides encoding a protein with OAC activity.

[0025] In an embodiment, the genetically modified microorganism further comprises one or more polynucleotides encoding proteins with Hydroxymethylglutaryl-CoA synthase activity; Hydroxymethylglutaryl-CoA reductase activity; tHMG1 activity; Acetyl-CoA C-acetyltransferase activity; or any combination thereof. In an embodiment, the genetically modified microorganism further comprises one or more polynucleotides encoding a Hydroxymethylglutaryl-CoA synthase (ERG13); a Hydroxymethylglutaryl-CoA reductase (HMG1); a tHMG1; a Acetyl-CoA C-acetyltransferase (ERG10); or any combination thereof. In an embodiment, the genetically modified microorganism further comprises a polynucleotide encoding an ERG13; a polynucleotide encoding a HGM1 and a polynucleotide encoding an amino acid sequence that is substantially identical to, at least about 75% identical, at least about 80% identical, at least about 85% identical, at least about 90% identical, at least about 91% identical, at least about 92% identical, at least about 93% identical, at least about 94% identical, at least about 95% identical, at least about 96% identical, at least about 97% identical, at least about 98% identical, or at least about 99% identical SEQ ID NO: 32. In an embodiment, the genetically modified microorganism further comprises a polynucleotide encoding a tHMG1; a polynucleotide encoding an ERG10 and a polynucleotide encoding an EGR13. In an embodiment, the genetically modified microorganism further comprises a polynucleotide encoding a tHMG1; a polynucleotide encoding an ERG13 and a polynucleotide encoding an AAE1. In an embodiment, the genetically modified microorganism further comprises a polynucleotide encoding an enzyme with CBDA synthase activity, a polynucleotide encoding an enzyme with CBCA synthase, a polynucleotide encoding an enzyme with CBCA and CBDA synthase activity, or a combination thereof, preferably wherein the the enzyme with CBDA synthase activity is substantially identical to, at least about 75% identical, at least about 80% identical, at least about 85% identical, at least about 90% identical, at least about 91% identical, at least about 92% identical, at least about 93% identical, at least about 94% identical, at least about 95% identical, at least about 96% identical, at least about 97% identical, at least about 98% identical, or at least about 99% identical to a sequence chosen from SEQ ID NO; 43 or SEQ ID NO: 153 to SEQ ID NO: 287; preferably wherein the polynucleotide encodes a CBDA synthase signal sequence substantially identical to, at least about 75% identical, at least about 80% identical, at least about 85% identical, at least about 90% identical, at least about 91% identical, at least about 92% identical, at least about 93% identical, at least about 94% identical, at least about 95% identical, at least about 96% identical, at least about 97% identical, at least about 98% identical, or at least about 99% identical to a sequence chosen from SEQ ID NO: 44 to SEQ ID NO: 73 or SEQ ID NO: 104 to SEQ ID NO: 110, preferably wherein the enzyme with CBCA synthase activity is substantially identical to, at least about 75% identical, at least about 80% identical, at least about 85% identical, at least about 90% identical, at least about 91% identical, at least about 92% identical, at least about 93% identical, at least about 94% identical, at least about 95% identical, at least about 96% identical, at least about 97% identical, at least about 98% identical, or at least about 99% identical to a sequence chosen from SEQ ID NO: 288 to SEQ ID NO: 297 or SEQ ID NO: 305 to SEQ ID NO: 318.

[0026] In an embodiment, the genetically modified microorganism further comprises the bCBGA1854 plasmid of SEQ ID No.: 435.

[0027] In an embodiment, the genetically modified microorganism further comprises a polynucleotiode encoding a protein with PKS activity, a polynucleotiode encoding a protein with OAC activity, and a polynucleotiode encoding a protein with AAE1 activity.

[0028] In an embodiment, the genetically modified microorganism further comprises a polynucleotide encoding a PIR3-CBDA of SEQ ID NO: 302.

[0029] In an embodiment, the genetically modified microorganism further comprises a signal peptide corresponding to 0253/asn053-2.

[0030] In an embodiment, the genetically modified microorganism's engodenous VPS10 gene is disrupted; preferably wherein the sequence of the disrupted gene is SEQ ID NO: 300. In an embodiment, the coding sequence of the microorganism's engodenous VPS10 gene is deleted

[0031] In an embodiment, the microorganism is capable of producing cannabigerolic acid. In an embodiment, the microorganism is capable of producing a cannabinoid. In an embodiment, the cannabinoid is selected from Δ9-tetrahydrocannabinolic acid (THCA), cannabidiolic acid (CBDA), cannabichromenic acid (CBCA), Δ9-tetrahydrocannabinol (THC), cannabidiol (CBD), cannabichromene (CBC), Δ⁹-tetrahydrocannabivarinic acid (THCVA), cannabidivarinic acid (CBDVA), cannabichromevarinic acid (CBCVA), or any combination thereof.

[0032] In an embodiment, the genetically modified microorganism comprises one or more endogenous genes is from a pathway that controls beta oxidation of long chain fatty acids. In an embodiment, the at least one endogenous gene is FOX1, FAA1, FAA4, FAT1, PXA1, PXA2, and/or PEX11. In an embodiment, the at least one endogenous gene is FOX1. In an embodiment, the one or more gene is disrupted using a CRISPR/Cas system.

[0033] In an embodiment, the genetically modified microorganism is a bacterium or a yeast. In an embodiment, said microorganism is a yeast. In an embodiment, said yeast is from the genus Saccharomyces. In an embodiment, wherein said yeast is from the species Saccharomyces cerevisiae.

[0034] In an embodiment, the genetically modified microorganism comprises at least two polynucleotides that encode for amino acid sequences that are substantially identical, at least about 75% identical, at least about 80% identical, at least about 85% identical, at least about 90% identical, at least about 91% identical, at least about 92% identical, at least about 93% identical, at least about 94% identical, at least about 95% identical, at least about 96% identical, at least about 97% identical, at least about 98% identical, or at least about 99% identical to SEQ ID NO: 27, SEQ ID NO: 32, or combinations thereof.

[0035] In an embodiment, the genetically modified microorganism comprises

[0036] genetically modified microorganism comprises at least three polynucleotides that encode for a protein with acyl activating activity, at least three polynucleotides that encode for a protein with polyketide synthase activity, at least three polynucleotides that encode for a protein with olivetolic acid cyclase activity.

[0037] In an embodiment, the genetically modified microorganism comprises a polynucleotide that encodes for a Saccharomyces cerevisiae TKS with a mutation at Ala125. In an embodiment, the mutation is Ala125Ser.

[0038] In an embodiment, the organism comprises a polynucleotide sequence encoding at least one amino acid sequence substantially identical, at least about 75% identical, at least about 80% identical, at least about 85% identical, at least about 90% identical, at least about 91% identical, at least about 92% identical, at least about 93% identical, at least about 94% identical, at least about 95% identical, at least about 96% identical, at least about 97% identical, at least about 98% identical, or at least about 99% identical to a sequence chosen from SEQ ID NO: 153 to SEQ ID NO: 287; preferably wherein the polynucleotide further encodes a CBDA synthase signal sequence substantially identical to, at least about 75% identical, at least about 80% identical, at least about 85% identical, at least about 90% identical, at least about 91% identical, at least about 92% identical, at least about 93% identical, at least about 94% identical, at least about 95% identical, at least about 96% identical, at least about 97% identical, at least about 98% identical, or at least about 99% identical to a sequence chosen from SEQ ID NO: 44 to SEQ ID NO: 73 or SEQ ID NO: 104 to SEQ ID NO: 110.

[0039] In an embodiment, the genetically modified organism comprises a polynucleotide sequence encoding at least one amino acid sequence substantially identical, at least about 75% identical, at least about 80% identical, at least about 85% identical, at least about 90% identical, at least about 91% identical, at least about 92% identical, at least about 93% identical, at least about 94% identical, at least about 95% identical, at least about 96% identical, at least about 97% identical, at least about 98% identical, or at least about 99% identical to a sequence chosen from SEQ ID NO: 288 to SEQ ID NO: 297 or SEQ ID NO: 305 to SEQ ID NO: 318.

[0040] In an embodiment the modified organism comprises a polypeptide comprising an amino acid sequence substantially identical, at least about 75% identical, at least about 80% identical, at least about 85% identical, at least about 90% identical, at least about 91% identical, at least about 92% identical, at least about 93% identical, at least about 94% identical, at least about 95% identical, at least about 96% identical, at least about 97% identical, at least about 98% identical, or at least about 99% identical to SEQ ID NO: 27.

[0041] In an embodiment the modified organism comprises a polynucleotide sequence encoding at least one amino acid sequence substantially identical to, at least about 75% identical, at least about 80% identical, at least about 85% identical, at least about 90% identical, at least about 91% identical, at least about 92% identical, at least about 93% identical, at least about 94% identical, at least about 95% identical, at least about 96% identical, at least about 97% identical, at least about 98% identical, or at least about 99% identical to SEQ ID: No. 120; preferably wherein the THCAS is a T446A mutant of SEQ ID NO: 120; a T446V mutant of SEQ ID NO: 120; or a T446I mutant of SEQ ID NO: 120, or a combination thereof.

[0042] In an embodiment, the genetically modified microorganism comprises at least one polynucleotide encoding for an amino acid sequence that is substantially identical, at least about 75% identical, at least about 80% identical, at least about 85% identical, at least about 90% identical, at least about 91% identical, at least about 92% identical, at least about 93% identical, at least about 94% identical, at least about 95% identical, at least about 96% identical, at least about 97% identical, at least about 98% identical, or at least about 99% identical to a sequence chosen from SEQ ID NO: 320 to SEQ ID NO: 379, a K239A+I240V+L241A combination mutant of SEQ ID NO: 320; a N242D mutant of SEQ ID NO: 320; a N24Q mutant of SEQ ID NO: 320; a G244L+H245K mutant of SEQ ID NO: 320; a K249R mutant of SEQ ID NO: 320; a C264S mutant of SEQ ID NO: 320; a F272I mutant of SEQ ID NO: 320; a R275P mutant of SEQ ID NO: 320; a R275K mutant of SEQ ID NO: 320; a M283I mutant of SEQ ID NO: 320; a M283C+W284F mutant of SEQ ID NO: 320; a F287L mutant of SEQ ID NO: 320; a S295C mutant of SEQ ID NO: 320; a F298G mutant of SEQ ID NO: 320; a F309I mutant of SEQ ID NO: 320; a I314V mutant of SEQ ID NO: 320; a S323A mutant of SEQ ID NO: 320; a S323T mutant of SEQ ID NO: 320; a M326I mutant of SEQ ID NO: 320, a E329Q mutant of SEQ ID NO: 320; a I333L mutant of SEQ ID NO: 320; a L343F mutant of SEQ ID NO: 320; a K348G mutant of SEQ ID NO: 320; a K350N mutant of SEQ ID NO: 320; a L354F mutant of SEQ ID NO: 320; a L354V+F355Y+V356I mutant of SEQ ID NO: 320; a F357Y mutant of SEQ ID NO: 320; a I360C mutant of SEQ ID NO: 320, a F361L mutant of SEQ ID NO: 320; a I363L mutant of SEQ ID NO: 320; a I374L mutant of SEQ ID NO: 320; a Q378K mutant of SEQ ID NO: 320; a T382A mutant of SEQ ID NO: 320; a S398V mutant of SEQ ID NO: 320, a S398V mutant of SEQ ID NO: 320; a T402S mutant of SEQ ID NO: 320; a S417T mutant of SEQ ID NO: 320; a A421L mutant of SEQ ID NO: 320; a M426F mutant of SEQ ID NO: 320, a M428L mutant of SEQ ID NO: 320; a V447+V450I mutant of SEQ ID NO: 320; a S448T mutant of SEQ ID NO: 320; a V450L mutant of SEQ ID NO: 320; a T460S+F461W+V462L mutant of SEQ ID NO: 320, a V473A mutant of SEQ ID NO: 320; a S476L mutant of SEQ ID NO: 320; a W481M mutant of SEQ ID NO: 320; a V484A mutant of SEQ ID NO: 320; a V484L+I489V+I491V mutant of SEQ ID NO: 320, a N488S mutant of SEQ ID NO: 320; a I489V mutant of SEQ ID NO: 320; a S493A mutant of SEQ ID NO: 320; a A495I mutant of SEQ ID NO: 320; a F499S mutant of SEQ ID NO: 320, a C500S mutant of SEQ ID NO: 320; a F503Y mutant of SEQ ID NO: 320; a L510K mutant of SEQ ID NO: 320, a Q520S mutant of SEQ ID NO: 320; a I525L mutant of SEQ ID NO: 320; a L527I mutant of SEQ ID NO: 320; or combinations thereof. In an embodiment, a polynucleotide encoding can encode at least one amino acid sequence disclosed herein. In an embodiment, a vector can comprise a polynucleotide disclosed herein. And in an embodiment, a polypeptide can comprise an amino acid sequence disclosed herein.

[0043] In an embodiment, the genetically modified microorganism may comprise at least one polynucleotide encoding for an amino acid sequence that is substantially identical, at least about 75% identical, at least about 80% identical, at least about 85% identical, at least about 90% identical, at least about 91% identical, at least about 92% identical, at least about 93% identical, at least about 94% identical, at least about 95% identical, at least about 96% identical, at least about 97% identical, at least about 98% identical, or at least about 99% identical to a sequence chosen from SEQ ID NO: 153 to SEQ ID NO: 287, or combinations thereof; preferably wherein the at least one polynucleotide further encodes a CBDA synthase signal sequence substantially identical to, at least about 75% identical, at least about 80% identical, at least about 85% identical, at least about 90% identical, at least about 91% identical, at least about 92% identical, at least about 93% identical, at least about 94% identical, at least about 95% identical, at least about 96% identical, at least about 97% identical, at least about 98% identical, or at least about 99% identical to a sequence chosen from SEQ ID NO: 44 to SEQ ID NO: 73 or SEQ ID NO: 104 to SEQ ID NO: 110. In an embodiment, a polynucleotide encoding can encode at least one amino acid sequence disclosed herein. In an embodiment, a vector can comprise a polynucleotide disclosed herein. And in an embodiment, a polypeptide can comprise an amino acid sequence disclosed herein.

[0044] In an embodiment, the genetically modified microorganism may comprise at least one polynucleotide encoding for an amino acid sequence that is substantially identical, at least about 75% identical, at least about 80% identical, at least about 85% identical, at least about 90% identical, at least about 91% identical, at least about 92% identical, at least about 93% identical, at least about 94% identical, at least about 95% identical, at least about 96% identical, at least about 97% identical, at least about 98% identical, or at least about 99% identical to a sequence chosen from SEQ ID NO: 288 to SEQ ID NO: 297 or SEQ ID NO: 305 to SEQ ID NO: 318, or combinations thereof. In an embodiement, a polynucleotide encoding can encode at least one amino acid sequence disclosed herein. In an embodiment, a vector can comprise a polynucleotide disclosed herein. And in an embodiment, a polypeptide can comprise an amino acid sequence disclosed herein.

[0045] In an embodiment, the genetically modified microorganism may comprise at least one polynucleotide encoding for an amino acid sequence that is substantially identical, at least about 75% identical, at least about 80% identical, at least about 85% identical, at least about 90% identical, at least about 91% identical, at least about 92% identical, at least about 93% identical, at least about 94% identical, at least about 95% identical, at least about 96% identical, at least about 97% identical, at least about 98% identical, or at least about 99% identical to a sequence chosen from THCAS is a T446A mutant of SEQ ID NO: 120; a T446V mutant of SEQ ID NO: 120; or a T446I mutant of SEQ ID NO: 120, or combinations thereof; preferably wherein the at least one polynucleotide encodes a THCAS signal sequence substantially identical to, at least about 75% identical, at least about 80% identical, at least about 85% identical, at least about 90% identical, at least about 91% identical, at least about 92% identical, at least about 93% identical, at least about 94% identical, at least about 95% identical, at least about 96% identical, at least about 97% identical, at least about 98% identical, or at least about 99% identical to a sequence chosen from SEQ ID NO: 121 to SEQ ID NO: 138. In an embodiement, a polynucleotide encoding can encode at least one amino acid sequence disclosed herein. In an embodiment, a vector can comprise a polynucleotide disclosed herein. And in an embodiment, a polypeptide can comprise an amino acid sequence disclosed herein.

[0046] In an embodiment, a method of producing a cannabinoid comprises (a) contacting a carbon substrate with a genetically modified microorganism disclosed herein (b) growing said genetically modified microorganism to produce a cannabinoid; and optionally (c) isolating the cannabinoid from the genetically modified organism. In an embodiment, the carbon substrate is a sugar, alcohol, and/or fatty acid. In an embodiment, the carbon substrate is selected from hexanoic acid, glucose, fructose, xylose, sucrose, dextrins, starch, xylan, cellulose, hemicellulose, arabinose, glycerol, ethanol, butanol, methanol, or any combination thereof. In an embodiment, the carbon substrate is hexanoic acid. In an embodiment, the cannabinoid is converted to Δ⁹-tetrahydrocannabinol (THC), cannabidiol (CBD), cannabichromene (CBC), or any combination thereof. In an embodiment the conversion is completed outside the microorganism. In an embodiment, the conversion is a non-enzymatic conversion. In an embodiment, the conversion is an enzymatic conversion.

[0047] Further embodiments disclose a use of a cannabinoid produced by any one of the disclosed methods for the manufacture of a medicament for the treatment of a disease or a symptom of a disease. In an embodiment, the disease or the symptom of a disease is anorexia, multiple sclerosis, neurodegenerative disorders, epilepsy, glaucoma, osteoporosis, schizophrenia, bipolar disorder, post-traumatic stress disorder (PTSD), asthma, cardiovascular disorders, cancer, obesity, metabolic syndrome-related disorders, depression, anxiety, insomnia, emesis, pain, or inflammation.

[0048] Further embodiments disclose a medicament comprising a cannabinoid made by any one of the disclosed methods and a pharmaceutically acceptable excipient. Further embodiments disclose a method of treating a disease or a symptom of a disease comprising administering a subject in need thereof the cannabinoid made by any one of the disclosed methods. In an embodiment, the disease or a symptom of a disease is anorexia, multiple sclerosis, neurodegenerative disorders, epilepsy, glaucoma, osteoporosis, schizophrenia, bipolar disorder, post-traumatic stress disorder (PTSD), asthma, cardiovascular disorders, cancer, obesity, metabolic syndrome-related disorders, depression, anxiety, insomnia, emesis, pain, or inflammation. Further embodiments disclose a method of treating a disease or a symptom of a disease comprising administering a subject in need thereof the disclosed medicament. Further embodiments disclose a use of a cannabinoid produced by any one of the disclosed microorganisms or methods for the manufacture of a medicament for recreational use. In an embodiment, the medicament or cannabinoid is delivered through inhalation, intravenously, oral, or topical application. In an embodiment, the delivery is inhalation and completed through a vaporizer. In an embodiment, the delivery is intravenous and the medicament is delivered through a saline solution. In an embodiment, the delivery is oral and the medicament is delivered with food. In an embodiment, the delivery is oral and the medicament is delivered through drink. In an embodiment, the delivery is topical and the medicament is delivered through a patch. In an embodiment, the delivery is topical and the medicament is delivered through a lotion.

[0049] Disclosed herein is a genetically modified microorganism comprising a polynucleotide that is at least 60%, 70%, 80%, 85%, 90%, 95%, 96%, 97%, 98%, or 99% identical to SEQ ID NO: 2. The polynucleotide can encode an amino acid sequence that is at least 60%, 70%, 80%, 85%, 90%, 95%, 96%, 97%, 98%, or 99% identical to SEQ ID NO: 1.

[0050] Disclosed herein is also a genetically modified microorganism comprising a polynucleotide that is at least 60%, 70%, 80%, 85%, 90%, 95%, 96%, 97%, 98%, or 99% identical to SEQ ID NO: 26. The polynucleotide can encode an amino acid sequence that is at least 60% identical to SEQ ID NO: 27.

[0051] Disclosed herein is also a genetically modified microorganism comprising a polynucleotide that is at least 60%, 70%, 80%, 85%, 90%, 95%, 96%, 97%, 98%, or 99% identical to SEQ ID NO: 31. The polynucleotide can encode an amino acid sequence that is at least 60% identical to SEQ ID NO: 32.

[0052] Disclosed herein is also a genetically modified microorganism comprising a polynucleotide that is at least 60%, 70%, 80%, 85%, 90%, 95%, 96%, 97%, 98%, or 99% identical to SEQ ID NO: 37. The polynucleotide can encode an amino acid sequence that is at least 60% identical to SEQ ID NO: 38.

[0053] In some cases, the polynucleotide can encode for an enzyme that is capable of converting olivetolic acid to cannabigerolic acid. In other cases, the polynucleotide can encode for a protein having prenyltransferase activity.

[0054] In some cases, the genetically modified microorganism can further comprise one or more nucleic acids encoding for acyl activating enzyme (AAE1); polyketide synthase (PKS); tetraketide synthase (TKS) (also referred to as olivetol synthase (OS)); olivetolic acid cyclase (OAC); THCA synthase (THCAS); CBDA synthase (CBDAS); CBCA synthase (CBCAS); HMG-Co reductase (HMG1); farnesyl pyrophosphate synthetase (ERG20); or any combination thereof. For example, if the microorganism comprises an AAE1, the AAE1 can be encoded by a polynucleotide sequence that is substantially identical to SEQ ID NO: 14. If the microorganism comprises a PKS, the PKS can be encoded by a polynucleotide sequence that is substantially identical, 60%, 70%, 80%, 85%, 90%, 95%, 96%, 97%, 98%, or 99% identical to SEQ ID NO: 6. If the microorganism comprises an OAC, the OAC can be encoded by a polynucleotide sequence that is substantially identical, 60%, 70%, 80%, 85%, 90%, 95%, 96%, 97%, 98%, or 99% identical to SEQ ID NO: 8. If the microorganism comprises a THCAS, the THCAS can be encoded by a polynucleotide sequence that is substantially identical, 60%, 70%, 80%, 85%, 90%, 95%, 96%, 97%, 98%, or 99% identical to SEQ ID NO: 10. If the microorganism comprises a CBDAS, the CBDAS can be encoded by a polynucleotide sequence that is substantially identical, 60%, 70%, 80%, 85%, 90%, 95%, 96%, 97%, 98%, or 99% identical to SEQ ID NO: 12. If the microorganism comprises a CBCAS, the CBCAS can be encoded by a polynucleotide sequence that is substantially identical, 60%, 70%, 80%, 85%, 90%, 95%, 96%, 97%, 98%, or 99% identical to SEQ ID NO: 18. If the microorganism comprises a HMG1, the HMG1 can be encoded by a polynucleotide sequence that is at least 90%, 95%, 96%, 97%, 98%, or 99% identical to SEQ ID NO: 20 or 22. If the microorganism comprises an ERG20, the ERG20 can be encoded by a polynucleotide sequence that is at least 90%, 95%, 96%, 97%, 98%, or 99% identical to SEQ ID NO: 24.

[0055] Disclosed herein is a method of making CBGA comprising (a) contacting a carbon substrate with a genetically modified microorganism, where the genetically modified microorganism comprises one or more polynucleotides encoding for i) acyl activating enzyme (AAE1); ii) a polyketide synthase (PKS), iii) a olivetolic acid cyclase (OAC), and iv) a prenyltransferase that comprises an amino acid sequence that is at least 60%, 70%, 80%, 85%, 90%, 95%, 96%, 97%, 98%, or 99% identical to SEQ ID NO: 1; and (b) growing the genetically modified microorganism to make CBGA.

[0056] Disclosed herein is a method of making CBGA comprising (a) contacting a carbon substrate with a genetically modified microorganism, where the genetically modified microorganism comprises one or more polynucleotides encoding for i) acyl activating enzyme (AAE1); ii) a polyketide synthase (PKS), iii) a olivetolic acid cyclase (OAC), and iv) a prenyltransferase that comprises an amino acid sequence that is at least 60% identical to SEQ ID NO: 27; and (b) growing the genetically modified microorganism to make CBGA.

[0057] Disclosed herein is a method of making CBGA comprising (a) contacting a carbon substrate with a genetically modified microorganism, where the genetically modified microorganism comprises one or more polynucleotides encoding for i) acyl activating enzyme (AAE1); ii) a polyketide synthase (PKS), iii) a olivetolic acid cyclase (OAC), and iv) a prenyltransferase that comprises an amino acid sequence that is at least 60%, 70%, 80%, 85%, 90%, 95%, 96%, 97%, 98%, or 99% identical to SEQ ID NO: 32; and (b) growing the genetically modified microorganism to make CBGA.

[0058] Disclosed herein is a method of making CBGA comprising (a) contacting a carbon substrate with a genetically modified microorganism, where the genetically modified microorganism comprises one or more polynucleotides encoding for i) acyl activating enzyme (AAE1); ii) a polyketide synthase (PKS), iii) a olivetolic acid cyclase (OAC), and iv) a prenyltransferase that comprises an amino acid sequence that is at least 60%, 70%, 80%, 85%, 90%, 95%, 96%, 97%, 98%, or 99% identical to SEQ ID NO: 38; and (b) growing the genetically modified microorganism to make CBGA.

[0059] The methods can also further comprise isolating the CBGA from (b). The method can also further comprise converting CBGA into CBG, Δ⁹-tetrahydrocannabinolic acid; THC; cannabidiolic acid; CBD; cannabichromenic acid; CBC; Δ⁹-tetrahydrocannabivarinic acid;

[0060] THCVA; cannabidivarinic acid; CBDVA; cannabichromevarinic acid; CBCVA; other cannabinoid; or any combination thereof. This CBGA conversion can be completed outside the microorganism. In some cases, the conversion is a non-enzymatic conversion. In other cases, the conversion is an enzymatic conversion.

[0061] Also disclosed herein is a method of making a cannabinoid comprising (a) contacting a carbon substrate with a genetically modified microorganism, where the genetically modified microorganism comprises one or more polynucleotides encoding for i) acyl activating enzyme (AAE1); ii) a polyketide synthase (PKS), iii) a olivetolic acid cyclase (OAC), iv) a prenyltransferase that comprises an amino acid sequence that is at least 60%, 70%, 80%, 85%, 90%, 95%, 96%, 97%, 98%, or 99% identical to SEQ ID NO: 1, and (v) a THCA synthase (THCAS); CBDA synthase (CBDAS), CBCA synthase (CBCAS), or any combination thereof; and (b) growing the genetically modified microorganism to make a cannabinoid.

[0062] Also disclosed herein is a method of making a cannabinoid comprising (a) contacting a carbon substrate with a genetically modified microorganism, where the genetically modified microorganism comprises one or more polynucleotides encoding for i) acyl activating enzyme (AAE1); ii) a polyketide synthase (PKS), iii) a olivetolic acid cyclase (OAC), iv) a prenyltransferase that comprises an amino acid sequence that is at least 60%, 70%, 80%, 85%, 90%, 95%, 96%, 97%, 98%, or 99% identical to SEQ ID NO: 27, and (v) a THCA synthase (THCAS); CBDA synthase (CBDAS), CBCA synthase (CBCAS), or any combination thereof; and (b) growing the genetically modified microorganism to make a cannabinoid.

[0063] Also disclosed herein is a method of making a cannabinoid comprising (a) contacting a carbon substrate with a genetically modified microorganism, where the genetically modified microorganism comprises one or more polynucleotides encoding for i) acyl activating enzyme (AAE1); ii) a polyketide synthase (PKS), iii) a olivetolic acid cyclase (OAC), iv) a prenyltransferase that comprises an amino acid sequence that is at least 60%, 70%, 80%, 85%, 90%, 95%, 96%, 97%, 98%, or 99% identical to SEQ ID NO: 32, and (v) a THCA synthase (THCAS); CBDA synthase (CBDAS), CBCA synthase (CBCAS), or any combination thereof; and (b) growing the genetically modified microorganism to make a cannabinoid.

[0064] Also disclosed herein is a method of making a cannabinoid comprising (a) contacting a carbon substrate with a genetically modified microorganism, where the genetically modified microorganism comprises one or more polynucleotides encoding for i) acyl activating enzyme (AAE1); ii) a polyketide synthase (PKS), iii) a olivetolic acid cyclase (OAC), iv) a prenyltransferase that comprises an amino acid sequence that is at least 60%, 70%, 80%, 85%, 90%, 95%, 96%, 97%, 98%, or 99% identical to SEQ ID NO: 38, and (v) a THCA synthase (THCAS); CBDA synthase (CBDAS), CBCA synthase (CBCAS), or any combination thereof; and (b) growing the genetically modified microorganism to make a cannabinoid.

[0065] The methods can further comprise isolating the cannabinoid from (b).

[0066] The carbon substrate used in the methods can be a sugar, alcohol, and/or fatty acid. For example, the sugar, alcohol or fatty acid can include without limitation hexanoic acid, butyric acid, glucose, fructose, xylose, sucrose, dextrins, starch, xylan, cellulose, hemicellulose, arabinose, glycerol, ethanol, butanol, methanol, or any combination thereof. In some cases, the carbon substrate is hexanoic acid. In other cases, the carbon substrate is butyric acid.

[0067] The methods can use the same or similar genetically modified microorganism described throughout. For example, if the microorganism comprises an AAE1, the AAE1 can be encoded by a polynucleotide sequence that is substantially identical or at least 60%, 70%, 80%, 85%, 90%, 95%, 96%, 97%, 98%, or 99% identical to SEQ ID NO: 14. If the microorganism comprises a PKS, the PKS can be encoded by a polynucleotide sequence that is substantially identical or at least 60%, 70%, 80%, 85%, 90%, 95%, 96%, 97%, 98%, or 99% identical to SEQ ID NO: 6. If the microorganism comprises an OAC, the OAC can be encoded by a polynucleotide sequence that is substantially identical or at least 60%, 70%, 80%, 85%, 90%, 95%, 96%, 97%, 98%, or 99% identical to SEQ ID NO: 8.

[0068] The methods can use a microorganism that can further comprise one or more nucleic acids encoding for THCA synthase (THCAS); CBDA synthase (CBDAS), CBCA synthase (CBCAS); or any combination thereof. If the microorganism comprises a THCAS, the THCAS can be encoded by a polynucleotide sequence that is substantially identical or at least 60%, 70%, 80%, 85%, 90%, 95%, 96%, 97%, 98%, or 99% identical to SEQ ID NO: 10. If the microorganism comprises a CBDAS, the CBDAS can be encoded by a polynucleotide sequence that is substantially identical or at least 60%, 70%, 80%, 85%, 90%, 95%, 96%, 97%, 98%, or 99% identical to SEQ ID NO: 12. If the microorganism comprises a CBCAS, the CBCAS can be encoded by a polynucleotide sequence that is substantially identical or at least 60%, 70%, 80%, 85%, 90%, 95%, 96%, 97%, 98%, or 99% identical to SEQ ID NO: 18. If the microorganism comprises an HMG1, the HMG1 can be encoded by a polynucleotide sequence that is substantially identical or at least 60%, 70%, 80%, 85%, 90%, 95%, 96%, 97%, 98%, or 99% identical to SEQ ID NO: 20 or 22. If the microorganism comprises an ERG20, the ERG20 can be encoded by a polynucleotide sequence that is substantially identical or at least 60%, 70%, 80%, 85%, 90%, 95%, 96%, 97%, 98%, or 99% identical to SEQ ID NO: 24. One or more of these enzymes can be present outside of a microorganism.

[0069] The methods can use a microorganism that can further comprise one or more genes that are disrupted. For example, the one or more genes that are disrupted can be from a pathway that controls beta oxidation of long chain fatty acids. In some cases, the one or more genes can be endogenous to the microorganism. In some cases, the one or more genes can comprise FOX1, FAA1, FAA4, FAT1, PXA1, PXA2, and/or PEX11.

[0070] Disclosed herein is a vector comprising a polynucleotide that is at least 60% identical or at least 60%, 70%, 80%, 85%, 90%, 95%, 96%, 97%, 98%, or 99% identical to SEQ ID NO: 2 and a promoter suitable for expression in a yeast host. Also disclosed herein is a vector comprising a polynucleotide that is at least 60%, 70%, 80%, 85%, 90%, 95%, 96%, 97%, 98%, or 99% identical to SEQ ID NO: 36 and a promoter suitable for expression in a yeast host. Also disclosed herein is a vector comprising a polynucleotide that is at least 60%, 70%, 80%, 85%, 90%, 95%, 96%, 97%, 98%, or 99% identical to SEQ ID NO: 31 and a promoter suitable for expression in a yeast host. Also disclosed herein is a vector comprising a polynucleotide that is at least 60%, 70%, 80%, 85%, 90%, 95%, 96%, 97%, 98%, or 99% identical to SEQ ID NO: 37 and a promoter suitable for expression in a yeast host.

[0071] Also disclosed herein is an isolated polynucleotide comprising a nucleotide sequence that is at least 60%, 70%, 80%, 85%, 90%, 95%, 96%, 97%, 98%, or 99% identical to SEQ ID NO: 2. Also disclosed herein is an isolated polynucleotide comprising a nucleotide sequence that is at least 60%, 70%, 80%, 85%, 90%, 95%, 96%, 97%, 98%, or 99% identical to SEQ ID NO: 26.

[0072] Also disclosed herein is an isolated polynucleotide comprising a nucleotide sequence that is at least 60%, 70%, 80%, 85%, 90%, 95%, 96%, 97%, 98%, or 99% identical to SEQ ID NO: 31.

[0073] Also disclosed herein is an isolated polynucleotide comprising a nucleotide sequence that is at least 60%, 70%, 80%, 85%, 90%, 95%, 96%, 97%, 98%, or 99% identical to SEQ ID NO: 37.

[0074] Further disclosed herein is a method of making a genetically modified microorganism capable of synthesizing CBGA comprising (a) contacting a microorganism with a polynucleotide that is at least 60%, 70%, 80%, 85%, 90%, 95%, 96%, 97%, 98%, or 99% identical to SEQ ID NO: 2; and (b) growing the microorganism so that the polynucleotide is inserted into the microorganism.

[0075] Also disclosed herein is a method of making a genetically modified microorganism capable of synthesizing CBGA comprising (a) contacting a microorganism with a polynucleotide that is at least 60%, 70%, 80%, 85%, 90%, 95%, 96%, 97%, 98%, or 99% identical to SEQ ID NO: 26; and (b) growing the microorganism so that the polynucleotide is inserted into the microorganism.

[0076] Also disclosed herein is a method of making a genetically modified microorganism capable of synthesizing CBGA comprising (a) contacting a microorganism with a polynucleotide that is at least 60%, 70%, 80%, 85%, 90%, 95%, 96%, 97%, 98%, or 99% identical to SEQ ID NO: 31; and (b) growing the microorganism so that the polynucleotide is inserted into the microorganism.

[0077] Also disclosed herein is a method of making a genetically modified microorganism capable of synthesizing CBGA comprising (a) contacting a microorganism with a polynucleotide that is at least 60%, 70%, 80%, 85%, 90%, 95%, 96%, 97%, 98%, or 99% identical to SEQ ID NO: 37; and (b) growing the microorganism so that the polynucleotide is inserted into the microorganism.

[0078] Also disclosed herein is a method of making a genetically modified microorganism capable of synthesizing cannabinoid comprising (a) contacting a microorganism with a polynucleotide that is at least 60%, 70%, 80%, 85%, 90%, 95%, 96%, 97%, 98%, or 99% identical to SEQ ID NO: 2; and (b) growing the microorganism so that the polynucleotide is inserted into the microorganism.

[0079] Also disclosed herein is a method of making a genetically modified microorganism capable of synthesizing cannabinoid comprising (a) contacting a microorganism with a polynucleotide that is at least 60%, 70%, 80%, 85%, 90%, 95%, 96%, 97%, 98%, or 99% identical to SEQ ID NO: 26; and (b) growing the microorganism so that the polynucleotide is inserted into the microorganism.

[0080] Also disclosed herein is a method of making a genetically modified microorganism capable of synthesizing cannabinoid comprising (a) contacting a microorganism with a polynucleotide that is at least 60%, 70%, 80%, 85%, 90%, 95%, 96%, 97%, 98%, or 99% identical to SEQ ID NO: 31; and (b) growing the microorganism so that the polynucleotide is inserted into the microorganism.

[0081] Also disclosed herein is a method of making a genetically modified microorganism capable of synthesizing cannabinoid comprising (a) contacting a microorganism with a polynucleotide that is at least 60%, 70%, 80%, 85%, 90%, 95%, 96%, 97%, 98%, or 99% identical to SEQ ID NO: 37; and (b) growing the microorganism so that the polynucleotide is inserted into the microorganism.

[0082] In some cases, the microorganism can translate the polynucleotide into an amino acid sequence that is at least 60%, 70%, 80%, 85%, 90%, 95%, 96%, 97%, 98%, or 99% identical to SEQ ID NO: 1. In some cases, the microorganism can translate the polynucleotide into an amino acid sequence that is at least 60%, 70%, 80%, 85%, 90%, 95%, 96%, 97%, 98%, or 99% identical to SEQ ID NO: 27. In some cases, the microorganism can translate the polynucleotide into an amino acid sequence that is at least 60%, 70%, 80%, 85%, 90%, 95%, 96%, 97%, 98%, or 99% identical to SEQ ID NO: 32. In some cases, the microorganism can translate the polynucleotide into an amino acid sequence that is at least 60%, 70%, 80%, 85%, 90%, 95%, 96%, 97%, 98%, or 99% identical to SEQ ID NO: 38. The polynucleotide can encode for a protein having prenyltransferase activity.

[0083] In some cases, the microorganism can be a bacterium or a yeast. If a yeast, the yeast can be from the genus Saccharomyces.

[0084] The microorganism can also comprise one or more additional polynucleotides that encodes for acyl activating enzyme (AAE1); polyketide synthase (PKS); olivetolic acid cyclase (OAC); THCA synthase (THCAS); CBDA synthase (CBDAS), CBCA synthase (CBCAS); HMG-Co reductase (HMG1); farnesyl pyrophosphate synthetase (ERG20); or any combination thereof.

[0085] In some cases, the method can comprise a genetically modified microorganism that comprises a polynucleotide encoding for an acyl activating enzyme (AAE1); polyketide synthase (PKS); olivetolic acid cyclase (OAC); and a prenyltransferase that is at least 60%, 70%, 80%, 85%, 90%, 95%, 96%, 97%, 98%, or 99% identical to SEQ ID NO: 2.

[0086] The methods can result in a cannabinoid, where the cannabinoid is Δ⁹-tetrahydrocannabinolic acid (THCA), cannabidiolic acid (CBDA), cannabichromenic acid (CBCA), Δ⁹-tetrahydrocannabinol (THC), cannabidiol (CBD), cannabichromene (CBC), Δ⁹-tetrahydrocannabivarinic acid (THCVA), cannabidivarinic acid (CBDVA), cannabichromevarinic acid (CBCVA) or any combination thereof.

[0087] Further disclosed is the use of a cannabinoid made by any one of the microorganisms or methods disclosed throughout for the manufacture of a medicament for recreational use. In some cases, the recreational use is delivered through inhalation, intravenously, oral, or topical. In some cases, the delivery is inhalation and completed through a vaporizer. In some cases, the delivery is intravenous and completed through a saline solution. In some cases, the delivery is oral and completed through food. In some cases, the delivery is oral and completed through drink. In some cases, the delivery is topical and completed through a patch. In some cases, the delivery is topical and completed through a lotion.

[0088] Further disclosed herein is a genetically modified microorganism that is capable of making a CBGA, which comprising a disruption of an endogenous gene that is FOX1. Further disclosed herein is a genetically modified microorganism that is capable of making a CBGA or CBGVA, which comprises a disruption of an endogenous gene that is VPS10. Further disclosed herein is a genetically modified microorganism of claims wherein FOX1 and VPS10 genes are deleted.

[0089] Further disclosed herein is a genetically modified microorganism comprising a polynucleotide that is at least 60% identical to the sequences depicted in FIG. 6A or 6B or 7.

[0090] Further disclosed is a genetically modified microorganism comprising a polynucleotide that is at least 60%, 70%, 80%, 85%, 90%, 95%, 96%, 97%, 98%, or 99% identical to the sequence depicted in Table 1.

### BRIEF DESCRIPTION OF THE DRAWINGS

[0091] The patent or application file contains at least one drawing executed in color. Copies of this patent or patent application publication with color drawing(s) will be provided by the Office upon request and payment of the necessary fee.

[0092] The novel features of the invention are set forth with particularity in the appended claims. A better understanding of the features and advantages of the present invention will be obtained by reference to the following detailed description that sets forth illustrative embodiments, in which the principles of the invention are utilized, and the accompanying drawings of which:

[0093] FIG. 1 shows the synthesis pathway from hexanoyl-CoA to CBGA. From CBGA, various cannabinoids can be made including but not limited to THC, CBD, CBC, and CBG.

[0094] FIG. 2 shows a representative chromatogram of one sample compared to a CBGA standard. This indicates that our strains produce CBGA, since our sample and the CBGA standard overlap.

[0095] FIG. 3 shows a representative MRM chromatogram of a THCA containing sample produced by the microorganism described throughout.

[0096] FIG. 4 shows a representative UV chromatogram of a THCA containing sample produced by the microorganism described throughout.

[0097] FIG. 5 shows the ability of two different yeast strains to produce CBGA, olivetolic acid, and olivetol. yCBGA_0373 strain with a knocked out FOX1 gene produced more CBGA, olivetolic acid, and olivetol compared to its parental yCBGA_0326 strain with wild type FOX1 gene. Error bars show standard deviation of the four replicates measured.

[0098] FIG. 6 depicts improved yields on various steps of the high throughput process for production of CBDA.

[0099] FIG. 7 depicts a yield of 700 mg/L CBGA using the yCBGA0513 strain in stirred tank fermenter in 3 days from 1 g/L HXA feed.

[0100] FIG. 8 depicts the ATG26 locus of the yCBGA0513 strain and the corresponding locuses in the yCBGA0520 strain, the yCBGA0523 strain, and the yCBGA0526 strain which replaced the ATG26 locus. All promoters are labeled beginning with “p.” All coding regions are labeled beginning with “cds.” All terminators are labeled beginning with “t.” The scale ruler (or graphic bar scale) at the top of the figure is in base pairs. Each increment denotes 500 base pairs.

### DETAILED DESCRIPTION OF THE DISCLOSURE

[0101] The following description and examples illustrate embodiments of the invention in detail. It is to be understood that this invention is not limited to the particular embodiments described herein and as such can vary. Those of skill in the art will recognize that there are numerous variations and modifications of this invention, which are encompassed within its scope.

[0102] The cannabinoid biosynthetic pathway starts with acyl activating enzyme (AAE1) (also known hexanoyl-CoA synthetase) which converts hexanoic acid to hexanoyl-CoA, which is used as a substrate for a reaction involving two enzymes, polyketide synthase (PKS) and olivetolic acid cyclase (OAC), to form olivetolic acid. Olivetolic acid is then geranylated by a prenyltransferase enzyme (PT) to form cannabigerolic acid (CBGA), a branch-point intermediate that is converted by oxidocyclase enzymes to Δ⁹-tetrahydrocannabinolic acid (THCA), cannabidiolic acid (CBDA), and cannabichromenic acid (CBCA). These compounds undergo nonenzymatic decarboxylation to their neutral forms, THC and cannabidiol (CBD) and cannabichromene (CBC), respectively. CBGA is a key pathway intermediate that is an important compound for the preparation of both known, commercialized cannabinoids and compounds in development. In some cases, butyric acid is used as a substrate for cannabinoid biosynthesis.

[0103] Described herein are genetically modified microorganisms, enzymes, polynucleotides, and methods to more efficiently produce CBGA or cannabinoids, including, THCA, CBDA, CBCA, THC, CBC and CBD.

### Definitions

[0104] The term “about” in relation to a reference numerical value and its grammatical equivalents as used herein can include the numerical value itself and a range of values plus or minus 10% from that numerical value. For example, the amount “about 10” includes 10 and any amounts from 9 to 11. For example, the term “about” in relation to a reference numerical value can also include a range of values plus or minus 10%, 9%, 8%, 7%, 6%, 5%, 4%, 3%, 2%, or 1% from that value. In some cases, the numerical disclosed throughout can be “about” that numerical value even without specifically mentioning the term “about.”

[0105] The term “genetic modification” or “genetically modified” and their grammatical equivalents as used herein can refer to one or more alterations of a nucleic acid, e.g., the nucleic acid within a microorganism's genome. For example, genetic modification can refer to alterations, additions, and/or deletion of nucleic acid (e.g., whole genes or fragments of genes).

[0106] The term “disrupting” and its grammatical equivalents as used herein can refer to a process of altering a gene, e.g., by deletion, insertion, mutation, rearrangement, or any combination thereof. For example, a gene can be disrupted by knockout. Disrupting a gene can be partially reducing or completely suppressing expression (e.g., mRNA and/or protein expression) of the gene. Disrupting can also include inhibitory technology, such as shRNA, siRNA, microRNA, dominant negative, or any other means to inhibit functionality or expression of a gene or protein.

[0107] The term “gene editing” and its grammatical equivalents as used herein can refer to genetic engineering in which one or more nucleotides are inserted, replaced, or removed from a genome. For example, gene editing can be performed using a nuclease (e.g., a natural-existing nuclease or an artificially engineered nuclease).

[0108] The terms “and/or” and “any combination thereof” and their grammatical equivalents as used herein, can be used interchangeably. These terms can convey that any combination is specifically contemplated. Solely for illustrative purposes, the following phrases “A, B, and/or C” or “A, B, C, or any combination thereof” can mean “A individually; B individually; C individually; A and B; B and C; A and C; and A, B, and C.”

[0109] The term “sugar” and its grammatical equivalents as used herein can include, but are not limited to (i) simple carbohydrates, such as monosaccharides (e.g., glucose fructose, galactose, ribose); disaccharides (e.g., maltose, sucrose, lactose); oligosaccharides (e.g., raffinose, stachyose); or (ii) complex carbohydrates, such as starch (e.g., long chains of glucose, amylose, amylopectin); glycogen; fiber (e.g., cellulose, hemicellulose, pectin, gum, mucilage).

[0110] The term “alcohol” and its grammatical equivalents as used herein can include, but are not limited to any organic compound in which the hydroxyl functional group (—OH) is bound to a saturated carbon atom. For example, the term alcohol can include i) monohydric alcohols (e.g., methanol, ethanol, isopropyl alcohol, butanol, pentanol, cetyl alcohol); ii) polyhydric alcohols (e.g., ethylene glycol, propylene glycol, glycerol, erythritol, threitol, xylitol, mannitol, sorbitol, volemitol); iii) unsaturated aliphatic alcohols (e.g., allyl alcohol, geraniol, propargyl alcohol); or iv) alicyclic alcohols (e.g., inositol, menthol).

[0111] The term “fatty acid” and its grammatical equivalents as used herein can include, but are not limited to, a carboxylic acid with a long aliphatic chain, which is either saturated or unsaturated. Some examples of unsaturated fatty acids include but are not limited to myristoleic acid, sapienic acid; linoelaidic acid; α-linolenic acid; stearidonic acid; eicosapentaenoic acid; docosahexaenoic acid; linoleic acid; γ-linolenic acid; dihomo-γ-linolenic acid; arachidonic acid; docosatetraenoic acid; palmitoleic acid; vaccenic acid; paullinic acid; oleic acid; elaidic acid; gondoic acid; erucic acid; nervonic acid; and mead acid. Some examples of saturated fatty acids include but are not limited to propionic acid, butyric acid, valeric acid, hexanoic acid, enanthic acid, caprylic acid, pelargonic acid, capric acid, undecylic acid, lauric acid, tridecylic acid, myristic acid, pentadecylic acid, palmitic acid, margaric acid, stearic acid, nonadecylic acid, arachidic acid, heneicosylic acid, behenic acid, tricosylic acid, lignoceric acid, pentacosylic acid, cerotic acid, heptacosylic acid, montanic acid, nonacosylic acid, melissic acid, henatriacontylic acid, lacceroic acid, psyllic acid, geddic acid, ceroplastic acid, hexatriacontylic acid, heptatriacontanoic acid, and octatriacontanoic acid.

[0112] The term “substantially pure” and its grammatical equivalents as used herein can mean that a particular substance does not contain a majority of another substance. For example, “substantially pure CBGA” can mean at least 90% CBGA. In some instances, “substantially pure CBGA” can mean at least 70%, 75%, 80%, 81%, 82%, 83%, 84%, 85%, 86%, 87%, 88%, 89%, 90%, 91%, 92%, 93%, 94%, 95%, 96%, 97%, 98%, 99%, 99.1%, 99.2%, 99.3%, 99.4%, 99.5%, 99.6%, 99.7%, 99.8%, 99.9%, 99.99%, 99.999%, or 99.9999% CBGA. For example, substantially pure CBGA can mean at least 70% CBGA. In some cases, substantially pure CBGA can mean at least 75% CBGA. In some cases, substantially pure CBGA can mean at least 80% CBGA. In some cases, substantially pure CBGA can mean at least 85% CBGA. In some cases, substantially pure CBGA can mean at least 90% CBGA. In some cases, substantially pure CBGA can mean at least 91% CBGA. In some cases, substantially pure CBGA can mean at least 92% CBGA. In some cases, substantially pure CBGA can mean at least 93% CBGA. In some cases, substantially pure CBGA can mean at least 94% CBGA. In some cases, substantially pure CBGA can mean at least 95% CBGA. In some cases, substantially pure CBGA can mean at least 96% CBGA. In some cases, substantially pure CBGA can mean at least 97% CBGA. In some cases, substantially pure CBGA can mean at least 98% CBGA. In some cases, substantially pure CBGA can mean at least 99% CBGA. In some cases, substantially pure CBGA can mean at least 99.9% CBGA. In some cases, substantially pure CBGA can mean at least 99.99% CBGA. In some cases, substantially pure CBGA can mean at least 99.999% CBGA. In some cases, substantially pure CBGA can mean at least 99.9999% CBGA.

[0113] The term “heterologous” and its grammatical equivalents as used herein can mean “derived from a different species.” For example, a “heterologous gene” can mean a gene that is from a different species. In some instances, as “a yeast comprising a heterologous gene” can mean that the yeast contains a gene that is not from the same yeast. The gene can be from a different microorganism such as bacterium or from a different species such as a different yeast species.

[0114] The term “substantially identical” and its grammatical equivalents in reference to another sequence as used herein can mean at least 50% identical. In some instances, the term substantially identical refers to a sequence that is 55% identical. In some instances, the term substantially identical refers to a sequence that is 60% identical. In some instances, the term substantially identical refers to a sequence that is 65% identical. In some instances, the term substantially identical refers to a sequence that is 70% identical. In some instances, the term substantially identical refers to a sequence that is 75% identical. In some instances, the term substantially identical refers to a sequence that is 80% identical. In other instances, the term substantially identical refers to a sequence that is 81% identical. In other instances, the term substantially identical refers to a sequence that is 82% identical. In other instances, the term substantially identical refers to a sequence that is 83% identical. In other instances, the term substantially identical refers to a sequence that is 84% identical. In other instances, the term substantially identical refers to a sequence that is 85% identical. In other instances, the term substantially identical refers to a sequence that is 86% identical. In other instances, the term substantially identical refers to a sequence that is 87% identical. In other instances, the term substantially identical refers to a sequence that is 88% identical. In other instances, the term substantially identical refers to a sequence that is 89% identical. In some instances, the term substantially identical refers to a sequence that is 90% identical. In some instances, the term substantially identical refers to a sequence that is 91% identical. In some instances, the term substantially identical refers to a sequence that is 92% identical. In some instances, the term substantially identical refers to a sequence that is 93% identical. In some instances, the term substantially identical refers to a sequence that is 94% identical. In some instances, the term substantially identical refers to a sequence that is 95% identical. In some instances, the term substantially identical refers to a sequence that is 96% identical. In some instances, the term substantially identical refers to a sequence that is 97% identical. In some instances, the term substantially identical refers to a sequence that is 98% identical. In some instances, the term substantially identical refers to a sequence that is 99% identical. In order to determine the percentage of identity between two sequences, the two sequences are aligned, using for example the alignment method of Needleman and Wunsch (J. Mol. Biol., 1970, 48: 443), as revised by Smith and Waterman (Adv. Appl. Math., 1981, 2: 482) so that the highest order match is obtained between the two sequences and the number of identical amino acids/nucleotides is determined between the two sequences. For example, methods to calculate the percentage identity between two amino acid sequences are generally art recognized and include, for example, those described by Carillo and Lipton (SIAM J. Applied Math., 1988, 48:1073) and those described in Computational Molecular Biology, Lesk, e.d. Oxford University Press, New York, 1988, Biocomputing: Informatics and Genomics Projects. Generally, computer programs will be employed for such calculations. Computer programs that can be used in this regard include, but are not limited to, GCG (Devereux et al., Nucleic Acids Res., 1984, 12: 387) BLASTP, BLASTN and FASTA (Altschul et al., J. Molec. Biol., 1990:215:403). A particularly preferred method for determining the percentage identity between two polypeptides involves the Clustal W algorithm (Thompson, J D, Higgines, D G and Gibson T J, 1994, Nucleic Acid Res 22(22): 4673-4680 together with the BLOSUM 62 scoring matrix (Henikoff S & Henikoff, J G, 1992, Proc. Natl. Acad. Sci. USA 89: 10915-10919 using a gap opening penalty of 10 and a gap extension penalty of 0.1, so that the highest order match obtained between two sequences wherein at least 50% of the total length of one of the two sequences is involved in the alignment.

[0115] The term “polyketide synthase”, “PKS”, “tetraketide synthase”, “olivetol synthase”, “OLS”, “OS” and their grammatical equivalents can be interchangeably used, as they refer to the same enzyme.

### General

[0116] A cannabinoid is one of a class of diverse chemical compounds that acts on cannabinoid receptors. Cannabinoids can alter neurotransmitter release in the brain. Ligands for these receptor proteins include the endocannabinoids (produced naturally in the body by animals), the phytocannabinoids (found in cannabis and some other plants), and synthetic cannabinoids (manufactured artificially). The most notable cannabinoid is the phytocannabinoid tetrahydrocannabinol (THC), the primary psychoactive compound in cannabis. Cannabidiol (CBD) is another major constituent of the plant. There are at least 113 different cannabinoids isolated from cannabis, exhibiting varied effects.

[0117] Cannabinoids can be useful in treating the side effects of cancer and cancer treatment. For example, one of the severe side effects of chemotherapy is loss of appetite. Marinol (containing delta-9-THC API) has been used to effectively treat this side effect. Other medical uses of cannabinoids include but are not limited to anti-inflammatory activity, blocking cell growth, preventing the growth of blood vessels that supply tumors, antiviral activity, and relieving muscle spasms caused by multiple sclerosis.

[0118] Disclosed herein are microorganisms and methods of making CBGA or cannabinoids.

### Microrganisms Used in the Synthesis of Cannabinoids

### Cell-Types

[0119] The cells that can be used include but are not limited to plant or animal cells, fungus, yeast, algae, or bacterium. The cells can be prokaryotes or in some cases can be eukaryotes. For example, the cell can be a Saccharomyces cerevisiae, Yarrowia lipolytica, or Escherichia coli, or any other cell disclosed throughout.

[0120] In certain cases, the cells are not naturally capable of producing CBGA or cannabinoids (e.g., THC, CBD, CBC, THCVA, CBDVA, CBCVA). In some cases, the cells are able to produce CBGA or cannabinoids but at a low level. By implementation of the methods described herein, the cells can be modified such that the level of CBGA or cannabinoids in the cells is higher relative to the level of CBGA or the same cannabinoid produced in the unmodified cells.

[0121] In some cases, the modified cell is capable of producing a substrate capable of being converted into a CBGA or a cannabinoid, however, the cells is not capable of naturally producing a cannabinoid. The genetically modified microorganisms in some cases are unable to produce a substrate capable of being converted into a CBGA or a cannabinoid (for example, hexanoic acid), and the substrate capable of being converted into a CBGA or a cannabinoid is provided to the cells as part of the cell's growth medium. In this case, the genetically modified microorganism can process the substrate into a desired product such as CBGA, THC, CBD, or CBC.

[0122] The cell can naturally comprise one or more enzyme capable of catalyzing one or more of the reactions: Hexanoyl-CoA to Olivetolic Acid; Olivetolic Acid to CBGA; CBGA to THCA; CBGA to CBDA; CBGA to CBCA; THCA to THC; CBDA to CBD; or CBCA to CBC.

[0123] The cell can naturally comprise one or more enzyme capable of catalyzing one or more of the reactions from a substrate such as butyric acid: CBGVA to THCVA; CBGVA to CBDVA; CBGVA to CBCVA; THCVA to THCV; CBDVA to CBDV; or CBCVA to CBCV.

[0124] In some cases, the modified cell is capable of producing a substrate capable of being converted into a CBGVA or a cannabinoid, however, the cells is not capable of naturally producing a cannabinoid. The genetically modified microorganisms in some cases are unable to produce a substrate capable of being converted into a CBGVA or a cannabinoid (for example, butyric acid), and the substrate capable of being converted into a CBGVA or a cannabinoid is provided to the cells as part of the cell's growth medium. In this case, the genetically modified microorganism can process the substrate into a desired product such as THCVA, CBDVA, or CBCVA.

[0125] Enzymes

[0126] The cells disclosed can be genetically modified with one or more enzymes that are capable of producing CBGA or CBGVA or a cannabinoid, and other pathway intermediates such as olivetolic acid. The cells disclosed can also be genetically modified with one or more enzymes that are capable of assisting in or enhancing the ability of the cell to produce CBGA or CBGVA or a cannabinoid, and other pathway intermediate (as disclosed throughout).

[0127] The cell can be modified to include an enzyme that can perform any one of the following reactions: hexanoic acid to hexanoyl-CoA, hexanoyl-CoA to olivetolic Acid; olivetolic Acid to CBGA; CBGA to THCA; CBGA to CBDA; CBGA to CBCA; THCA to THC; CBDA to CBD; or CBCA to CBC. For example, the cell can be modified with one or more of the following enzymes: polyketide synthase (PKS); olivetolic acid cyclase (OAC); prenyltransferase (PT); THCA synthase (THCAS); CBDA synthase (CBDAS), CBCA synthase (CBCAS); or any combination thereof. Additional enzymes that can be included include but are not limited to HMG-CoA reductase, ERG20 reductase, or both. These enzymes can either be endogenous to the cell or heterologous. However, in some cases, even if the enzyme is endogenous, it can be made to be overexpressed. The heterologous enzymes can also be overexpressed.

[0128] In some cases, two or more consecutive enzymes in the pathway from a carbon substrate (e.g., sugar) to any of the cannabinoids described throughout (e.g., THCA, CBDA, CBCA, THC, CBD, CBC, CBGVA, THCVA, CBDVA, CBCVA) can be used. In some cases, three or more consecutive enzymes in the pathway can be used. In some cases, four or more consecutive enzymes in the pathway can be used. In some cases, five or more consecutive enzymes in the pathway can be used. In some cases, six or more consecutive enzymes in the pathway can be used. In some cases, seven or more consecutive enzymes in the pathway can be used. In some cases, eight or more consecutive enzymes in the pathway can be used. In some cases, nine or more consecutive enzymes in the pathway can be used. In some cases, ten or more consecutive enzymes in the pathway can be used.

[0129] In some cases, when an acyl activating enzyme (AAE1) is desired, the AAE1 can be encoded by an amino acid sequence that is substantially identical to SEQ ID NO: 13. In some cases, the AAE1 can be encoded by an amino acid sequence that is at least 50% identical to SEQ ID NO: 13. In some cases, the AAE1 can be encoded by an amino acid sequence that is at least 55% identical to SEQ ID NO: 13. In some cases, the AAE1 can be encoded by an amino acid sequence that is at least 60% identical to SEQ ID NO: 13. In some cases, the AAE1 can be encoded by an amino acid sequence that is at least 65% identical to SEQ ID NO: 13. In some cases, the AAE1 can be encoded by an amino acid sequence that is at least 70% identical to SEQ ID NO: 13. In some cases, the AAE1 can be encoded by an amino acid sequence that is at least 75% identical to SEQ ID NO: 13. In some cases, the AAE1 can be encoded by an amino acid sequence that is at least 80% identical to SEQ ID NO: 13. In some cases, the AAE1 can be encoded by an amino acid sequence that is at least 81% identical to SEQ ID NO: 13. In some cases, the AAE1 can be encoded by an amino acid sequence that is at least 82% identical to SEQ ID NO: 13. In some cases, the AAE1 can be encoded by an amino acid sequence that is at least 83% identical to SEQ ID NO: 13. In some cases, the AAE1 can be encoded by an amino acid sequence that is at least 84% identical to SEQ ID NO: 13. In some cases, the AAE1 can be encoded by an amino acid sequence that is at least 85% identical to SEQ ID NO: 13. In some cases, the AAE1 can be encoded by an amino acid sequence that is at least 86% identical to SEQ ID NO: 13. In some cases, the AAE1 can be encoded by an amino acid sequence that is at least 87% identical to SEQ ID NO: 13. In some cases, the AAE1 can be encoded by an amino acid sequence that is at least 88% identical to SEQ ID NO: 13. In some cases, the AAE1 can be encoded by an amino acid sequence that is at least 89% identical to SEQ ID NO: 13. In some cases, the AAE1 can be encoded by an amino acid sequence that is at least 90% identical to SEQ ID NO: 13. In some cases, the AAE1 can be encoded by an amino acid sequence that is at least 91% identical to SEQ ID NO: 13. In some cases, the AAE1 can be encoded by an amino acid sequence that is at least 92% identical to SEQ ID NO: 13. In some cases, the AAE1 can be encoded by an amino acid sequence that is at least 93% identical to SEQ ID NO: 13. In some cases, the AAE1 can be encoded by an amino acid sequence that is at least 94% identical to SEQ ID NO: 13. In some cases, the AAE1 can be encoded by an amino acid sequence that is at least 95% identical to SEQ ID NO: 13. In some cases, the AAE1 can be encoded by an amino acid sequence that is at least 96% identical to SEQ ID NO: 13. In some cases, the AAE1 can be encoded by an amino acid sequence that is at least 97% identical to SEQ ID NO: 13. In some cases, the AAE1 can be encoded by an amino acid sequence that is at least 98% identical to SEQ ID NO: 13. In some cases, the AAE1 can be encoded by an amino acid sequence that is at least 99% identical to SEQ ID NO: 13. In some cases, the AAE1 can be encoded by an amino acid sequence that is identical to SEQ ID NO: 13. In some cases, the amino acid sequence can be optimized to correspond to amino acid usage within a specific host organism/cell.

[0130] In some cases when a polyketide synthase (PKS) is desired, the PKS can be encoded by an amino acid sequence that is substantially identical to SEQ ID NO: 5. In some cases, the PKS can be encoded by an amino acid sequence that is at least 50% identical to SEQ ID NO: 5. In some cases, the PKS can be encoded by an amino acid sequence that is at least 55% identical to SEQ ID NO: 5. In some cases, the PKS can be encoded by an amino acid sequence that is at least 60% identical to SEQ ID NO: 5. In some cases, the PKS can be encoded by an amino acid sequence that is at least 65% identical to SEQ ID NO: 5. In some cases, the PKS can be encoded by an amino acid sequence that is at least 70% identical to SEQ ID NO: 5. In some cases, the PKS can be encoded by an amino acid sequence that is at least 75% identical to SEQ ID NO: 5. In some cases, the PKS can be encoded by an amino acid sequence that is at least 80% identical to SEQ ID NO: 5. In some cases, the PKS can be encoded by an amino acid sequence that is at least 81% identical to SEQ ID NO: 5. In some cases, the PKS can be encoded by an amino acid sequence that is at least 82% identical to SEQ ID NO: 5. In some cases, the PKS can be encoded by an amino acid sequence that is at least 83% identical to SEQ ID NO: 5. In some cases, the PKS can be encoded by an amino acid sequence that is at least 84% identical to SEQ ID NO: 5. In some cases, the PKS can be encoded by an amino acid sequence that is at least 85% identical to SEQ ID NO: 5. In some cases, the PKS can be encoded by an amino acid sequence that is at least 86% identical to SEQ ID NO: 5. In some cases, the PKS can be encoded by an amino acid sequence that is at least 87% identical to SEQ ID NO: 5. In some cases, the PKS can be encoded by an amino acid sequence that is at least 88% identical to SEQ ID NO: 5. In some cases, the PKS can be encoded by an amino acid sequence that is at least 89% identical to SEQ ID NO: 5. In some cases, the PKS can be encoded by an amino acid sequence that is at least 90% identical to SEQ ID NO: 5. In some cases, the PKS can be encoded by an amino acid sequence that is at least 91% identical to SEQ ID NO: 5. In some cases, the PKS can be encoded by an amino acid sequence that is at least 92% identical to SEQ ID NO: 5. In some cases, the PKS can be encoded by an amino acid sequence that is at least 93% identical to SEQ ID NO: 5. In some cases, the PKS can be encoded by an amino acid sequence that is at least 94% identical to SEQ ID NO: 5. In some cases, the PKS can be encoded by an amino acid sequence that is at least 95% identical to SEQ ID NO: 5. In some cases, the PKS can be encoded by an amino acid sequence that is at least 96% identical to SEQ ID NO: 5. In some cases, the PKS can be encoded by an amino acid sequence that is at least 97% identical to SEQ ID NO: 5. In some cases, the PKS can be encoded by an amino acid sequence that is at least 98% identical to SEQ ID NO: 5. In some cases, the PKS can be encoded by an amino acid sequence that is at least 99% identical to SEQ ID NO: 5. In some cases, the PKS can be encoded by an amino acid sequence that is identical to SEQ ID NO: 5. In some cases, the amino acid sequence can be optimized to correspond to amino acid usage within a specific host organism/cell.

[0131] In some cases when an olivetolic acid cyclase (OAC) is desired, the OAC can be encoded by an amino acid sequence that is substantially identical to SEQ ID NO: 7. In some cases, the OAC can be encoded by an amino acid sequence that is at least 50% identical to SEQ ID NO: 7. In some cases, the OAC can be encoded by an amino acid sequence that is at least 55% identical to SEQ ID NO: 7. In some cases, the OAC can be encoded by an amino acid sequence that is at least 60% identical to SEQ ID NO: 7. In some cases, the OAC can be encoded by an amino acid sequence that is at least 65% identical to SEQ ID NO: 7. In some cases, the OAC can be encoded by an amino acid sequence that is at least 70% identical to SEQ ID NO: 7. In some cases, the OAC can be encoded by an amino acid sequence that is at least 75% identical to SEQ ID NO: 7. In some cases, the OAC can be encoded by an amino acid sequence that is at least 80% identical to SEQ ID NO: 7. In some cases, the OAC can be encoded by an amino acid sequence that is at least 81% identical to SEQ ID NO: 7. In some cases, the OAC can be encoded by an amino acid sequence that is at least 82% identical to SEQ ID NO: 7. In some cases, the OAC can be encoded by an amino acid sequence that is at least 83% identical to SEQ ID NO: 7. In some cases, the OAC can be encoded by an amino acid sequence that is at least 84% identical to SEQ ID NO: 7. In some cases, the OAC can be encoded by an amino acid sequence that is at least 85% identical to SEQ ID NO: 7. In some cases, the OAC can be encoded by an amino acid sequence that is at least 86% identical to SEQ ID NO: 7. In some cases, the OAC can be encoded by an amino acid sequence that is at least 87% identical to SEQ ID NO: 7. In some cases, the OAC can be encoded by an amino acid sequence that is at least 88% identical to SEQ ID NO: 7. In some cases, the OAC can be encoded by an amino acid sequence that is at least 89% identical to SEQ ID NO: 7. In some cases, the OAC can be encoded by an amino acid sequence that is at least 90% identical to SEQ ID NO: 7. In some cases, the OAC can be encoded by an amino acid sequence that is at least 91% identical to SEQ ID NO: 7. In some cases, the OAC can be encoded by an amino acid sequence that is at least 92% identical to SEQ ID NO: 7. In some cases, the OAC can be encoded by an amino acid sequence that is at least 93% identical to SEQ ID NO: 7. In some cases, the OAC can be encoded by an amino acid sequence that is at least 94% identical to SEQ ID NO: 7. In some cases, the OAC can be encoded by an amino acid sequence that is at least 95% identical to SEQ ID NO: 7. In some cases, the OAC can be encoded by an amino acid sequence that is at least 96% identical to SEQ ID NO: 7. In some cases, the OAC can be encoded by an amino acid sequence that is at least 97% identical to SEQ ID NO: 7. In some cases, the OAC can be encoded by an amino acid sequence that is at least 98% identical to SEQ ID NO: 7. In some cases, the OAC can be encoded by an amino acid sequence that is at least 99% identical to SEQ ID NO: 7. In some cases, the OAC can be encoded by an amino acid sequence that is identical to SEQ ID NO: 7. In some cases, the amino acid sequence can be optimized to correspond to amino acid usage within a specific host organism/cell.

[0132] In some cases when a prenyltransferase (PT) is desired, the PT can be encoded by an amino acid sequence that is substantially identical to any one of SEQ ID NOs: 1, 27, 32, 38 or 320-379. In some cases, the amino acid sequence encoding a prenyltransferase can be at least 50% identical to any one of SEQ ID NOs: 1, 27, 32, 38 or 320-379. In some cases, the amino acid sequence encoding a prenyltransferase can be at least 55% identical to any one of SEQ ID NOs: 1, 27, 32, 38 or 320-379. In some cases, the amino acid sequence encoding a prenyltransferase can be at least 60% identical to any one of SEQ ID NOs: 1, 27, 32, 38 or 320-379. In some cases, the amino acid sequence encoding a prenyltransferase can be at least 65% identical to any one of SEQ ID NOs: 1, 27, 32, 38 or 320-379. In some cases, the amino acid sequence encoding a prenyltransferase can be at least 70% identical to any one of SEQ ID NOs: 1, 27, 32, 38 or 320-379. In some cases, the amino acid sequence encoding a prenyltransferase can be at least 75% identical to any one of SEQ ID NOs: 1, 27, 32, 38 or 320-379. In some cases, the amino acid sequence encoding a prenyltransferase can be at least 80% identical to any one of SEQ ID NOs: 1, 27, 32, 38 or 320-379. In some cases, the amino acid sequence encoding a prenyltransferase can be at least 81% identical to any one of SEQ ID NOs: 1, 27, 32, 38 or 320-379. In some cases, the amino acid sequence encoding a prenyltransferase can be at least 82% identical to any one of SEQ ID NOs: 1, 27, 32, 38 or 320-379. In some cases, the amino acid sequence encoding a prenyltransferase can be at least 83% identical to any one of SEQ ID NOs: 1, 27, 32, 38 or 320-379. In some cases, the amino acid sequence encoding a prenyltransferase can be at least 84% identical to any one of SEQ ID NOs: 1, 27, 32, 38 or 320-379. In some cases, the amino acid sequence encoding a prenyltransferase can be at least 85% identical to any one of SEQ ID NOs: 1, 27, 32, 38 or 320-379. In some cases, the amino acid sequence encoding a prenyltransferase can be at least 86% identical to any one of SEQ ID NOs: 1, 27, 32, 38 or 320-379. In some cases, the amino acid sequence encoding a prenyltransferase can be at least 87% identical to any one of SEQ ID NOs: 1, 27, 32, 38 or 320-379. In some cases, the amino acid sequence encoding a prenyltransferase can be at least 88% identical to any one of SEQ ID NOs: 1, 27, 32, 38 or 320-379. In some cases, the amino acid sequence encoding a prenyltransferase can be at least 89% identical to any one of SEQ ID NOs: 1, 27, 32, 38 or 320-379. In some cases, the amino acid sequence encoding a prenyltransferase can be at least 90% identical to any one of SEQ ID NOs: 1, 27, 32, 38 or 320-379. In some cases, the amino acid sequence encoding a prenyltransferase can be at least 91% identical to any one of SEQ ID NOs: 1, 27, 32, 38 or 320-379. In some cases, the amino acid sequence encoding a prenyltransferase can be at least 92% identical to any one of SEQ ID NOs: 1, 27, 32, 38 or 320-379. In some cases, the amino acid sequence encoding a prenyltransferase can be at least 93% identical to any one of SEQ ID NOs: 1, 27, 32, 38 or 320-379. In some cases, the amino acid sequence encoding a prenyltransferase can be at least 94% identical to any one of SEQ ID NOs: 1, 27, 32, 38 or 320-379. In some cases, the amino acid sequence encoding a prenyltransferase can be at least 95% identical to any one of SEQ ID NOs: 1, 27, 32, 38 or 320-379. In some cases, the amino acid sequence encoding a prenyltransferase can be at least 96% identical to any one of SEQ ID NOs: 1, 27, 32, 38 or 320-379. In some cases, the amino acid sequence encoding a prenyltransferase can be at least 97% identical to any one of SEQ ID NOs: 1, 27, 32, 38 or 320-379. In some cases, the amino acid sequence encoding a prenyltransferase can be at least 98% identical to any one of SEQ ID NOs: 1, 27, 32, 38 or 320-379. In some cases, the amino acid sequence encoding a prenyltransferase can be at least 99% identical to any one of SEQ ID NOs: 1, 27, 32, 38 or 320-379. In some cases, the amino acid sequence encoding a prenyltransferase can be identical to any one of SEQ ID NOs: 1, 27, 32, 38 or 320-379. In some cases, the amino acid sequence can be optimized to correspond to amino acid usage within a specific host organism/cell.

[0133] Additionally, other enzymes can be used to make different products. These enzymes can include a THCA synthase (THCAS); CBDA synthase (CBDAS), CBCA synthase (CBCAS), or any combination thereof.

[0134] In some cases, when a THCA synthase (THCAS) is desired, the THCAS can be encoded by an amino acid sequence that is substantially identical to SEQ ID NO: 9. In some cases, the amino acid sequence encoding a THCAS can be at least 50% identical to SEQ ID NO: 9. In some cases, the amino acid sequence encoding a THCAS can be at least 55% identical to SEQ ID NO: 9. In some cases, the amino acid sequence encoding a THCAS can be at least 60% identical to SEQ ID NO: 9. In some cases, the amino acid sequence encoding a THCAS can be at least 65% identical to SEQ ID NO: 9. In some cases, the amino acid sequence encoding a THCAS can be at least 70% identical to SEQ ID NO: 9. In some cases, the amino acid sequence encoding a THCAS can be at least 75% identical to SEQ ID NO: 9. In some cases, the amino acid sequence encoding a THCAS can be at least 80% identical to SEQ ID NO: 9. In some cases, the amino acid sequence encoding a THCAS can be at least 81% identical to SEQ ID NO: 9. In some cases, the amino acid sequence encoding a THCAS can be at least 82% identical to SEQ ID NO: 9. In some cases, the amino acid sequence encoding a THCAS can be at least 83% identical to SEQ ID NO: 9. In some cases, the amino acid sequence encoding a THCAS can be at least 84% identical to SEQ ID NO: 9. In some cases, the amino acid sequence encoding a THCAS can be at least 85% identical to SEQ ID NO: 9. In some cases, the amino acid sequence encoding a THCAS can be at least 86% identical to SEQ ID NO: 9. In some cases, the amino acid sequence encoding a THCAS can be at least 87% identical to SEQ ID NO: 9. In some cases, the amino acid sequence encoding a THCAS can be at least 88% identical to SEQ ID NO: 9. In some cases, the amino acid sequence encoding a THCAS can be at least 89% identical to SEQ ID NO: 9. In some cases, the amino acid sequence encoding a THCAS can be at least 90% identical to SEQ ID NO: 9. In some cases, the amino acid sequence encoding a THCAS can be at least 91% identical to SEQ ID NO: 9. In some cases, the amino acid sequence encoding a THCAS can be at least 92% identical to SEQ ID NO: 9. In some cases, the amino acid sequence encoding a THCAS can be at least 93% identical to SEQ ID NO: 9. In some cases, the amino acid sequence encoding a THCAS can be at least 94% identical to SEQ ID NO: 9. In some cases, the amino acid sequence encoding a THCAS can be at least 95% identical to SEQ ID NO: 9. In some cases, the amino acid sequence encoding a THCAS can be at least 96% identical to SEQ ID NO: 9. In some cases, the amino acid sequence encoding a THCAS can be at least 97% identical to SEQ ID NO: 9. In some cases, the amino acid sequence encoding a THCAS can be at least 98% identical to SEQ ID NO: 9. In some cases, the amino acid sequence encoding a THCAS can be at least 99% identical to SEQ ID NO: 9. In some cases, the amino acid sequence encoding a THCAS can be identical to SEQ ID NO: 9. In some cases, the amino acid sequence can be optimized to correspond to amino acid usage within a specific host organism/cell. The use of a THCAS, in some cases, can result in the enzymatic synthesis of Δ9-tetrahydrocannabinol (THC) and the accumulation of THC within the cell or culture medium.

[0135] In some cases, when a CBDA synthase (CBDAS) is desired, the CBDAS can be encoded by an amino acid sequence that is substantially identical to SEQ ID NO: 11. In some cases, the amino acid sequence encoding a CBDAS can be at least 50% identical to SEQ ID NO: 11. In some cases, the amino acid sequence encoding a CBDAS can be at least 55% identical to SEQ ID NO: 11. In some cases, the amino acid sequence encoding a CBDAS can be at least 60% identical to SEQ ID NO: 11. In some cases, the amino acid sequence encoding a CBDAS can be at least 65% identical to SEQ ID NO: 11. In some cases, the amino acid sequence encoding a CBDAS can be at least 70% identical to SEQ ID NO: 11. In some cases, the amino acid sequence encoding a CBDAS can be at least 75% identical to SEQ ID NO: 11. In some cases, the amino acid sequence encoding a CBDAS can be at least 80% identical to SEQ ID NO: 11. In some cases, the amino acid sequence encoding a CBDAS can be at least 81% identical to SEQ ID NO: 11. In some cases, the amino acid sequence encoding a CBDAS can be at least 82% identical to SEQ ID NO: 11. In some cases, the amino acid sequence encoding a CBDAS can be at least 83% identical to SEQ ID NO: 11. In some cases, the amino acid sequence encoding a CBDAS can be at least 84% identical to SEQ ID NO: 11. In some cases, the amino acid sequence encoding a CBDAS can be at least 85% identical to SEQ ID NO: 11. In some cases, the amino acid sequence encoding a CBDAS can be at least 86% identical to SEQ ID NO: 11. In some cases, the amino acid sequence encoding a CBDAS can be at least 87% identical to SEQ ID NO: 11. In some cases, the amino acid sequence encoding a CBDAS can be at least 88% identical to SEQ ID NO: 11. In some cases, the amino acid sequence encoding a CBDAS can be at least 89% identical to SEQ ID NO: 11. In some cases, the amino acid sequence encoding a CBDAS can be at least 90% identical to SEQ ID NO: 11. In some cases, the amino acid sequence encoding a CBDAS can be at least 91% identical to SEQ ID NO: 11. In some cases, the amino acid sequence encoding a CBDAS can be at least 92% identical to SEQ ID NO: 11. In some cases, the amino acid sequence encoding a CBDAS can be at least 93% identical to SEQ ID NO: 11. In some cases, the amino acid sequence encoding a CBDAS can be at least 94% identical to SEQ ID NO: 11. In some cases, the amino acid sequence encoding a CBDAS can be at least 95% identical to SEQ ID NO: 11. In some cases, the amino acid sequence encoding a CBDAS can be at least 96% identical to SEQ ID NO: 11. In some cases, the amino acid sequence encoding a CBDAS can be at least 97% identical to SEQ ID NO: 11. In some cases, the amino acid sequence encoding a CBDAS can be at least 98% identical to SEQ ID NO: 11. In some cases, the amino acid sequence encoding a CBDAS can be at least 99% identical to SEQ ID NO: 11. In some cases, the amino acid sequence encoding a CBDAS can be identical to SEQ ID NO: 11. In some cases, the amino acid sequence can be optimized to correspond to amino acid usage within a specific host organism/cell. The use of a CBDAS in some cases can result in the enzymatic synthesis of cannabidiol (CBD) and the accumulation of CBD within the cell or culture medium.

[0136] In some cases, when a CBCA synthase (CBCAS) is desired, the CDCS can be encoded by an amino acid sequence that is substantially identical to SEQ ID NO: 17. In some cases, the amino acid sequence encoding a CBCAS can be at least 50% identical to SEQ ID NO: 17. In some cases, the amino acid sequence encoding a CBCAS can be at least 55% identical to SEQ ID NO: 17. In some cases, the amino acid sequence encoding a CBCAS can be at least 60% identical to SEQ ID NO: 17. In some cases, the amino acid sequence encoding a CBCAS can be at least 65% identical to SEQ ID NO: 17. In some cases, the amino acid sequence encoding a CBCAS can be at least 70% identical to SEQ ID NO: 17. In some cases, the amino acid sequence encoding a CBCAS can be at least 75% identical to SEQ ID NO: 17. In some cases, the amino acid sequence encoding a CBCAS can be at least 80% identical to SEQ ID NO: 17. In some cases, the amino acid sequence encoding a CBCAS can be at least 81% identical to SEQ ID NO: 17. In some cases, the amino acid sequence encoding a CBCAS can be at least 82% identical to SEQ ID NO: 17. In some cases, the amino acid sequence encoding a CBCAS can be at least 83% identical to SEQ ID NO: 17. In some cases, the amino acid sequence encoding a CBCAS can be at least 84% identical to SEQ ID NO: 17. In some cases, the amino acid sequence encoding a CBCAS can be at least 85% identical to SEQ ID NO: 17. In some cases, the amino acid sequence encoding a CBCAS can be at least 86% identical to SEQ ID NO: 17. In some cases, the amino acid sequence encoding a CBCAS can be at least 87% identical to SEQ ID NO: 17. In some cases, the amino acid sequence encoding a CBCAS can be at least 88% identical to SEQ ID NO: 17. In some cases, the amino acid sequence encoding a CBCAS can be at least 89% identical to SEQ ID NO: 17. In some cases, the amino acid sequence encoding a CBCAS can be at least 90% identical to SEQ ID NO: 17. In some cases, the amino acid sequence encoding a CBCAS can be at least 91% identical to SEQ ID NO: 17. In some cases, the amino acid sequence encoding a CBCAS can be at least 92% identical to SEQ ID NO: 17. In some cases, the amino acid sequence encoding a CBCAS can be at least 93% identical to SEQ ID NO: 17. In some cases, the amino acid sequence encoding a CBCAS can be at least 94% identical to SEQ ID NO: 17. In some cases, the amino acid sequence encoding a CBCAS can be at least 95% identical to SEQ ID NO: 17. In some cases, the amino acid sequence encoding a CBCAS can be at least 96% identical to SEQ ID NO: 17. In some cases, the amino acid sequence encoding a CBCAS can be at least 97% identical to SEQ ID NO: 17. In some cases, the amino acid sequence encoding a CBCAS can be at least 98% identical to SEQ ID NO: 17. In some cases, the amino acid sequence encoding a CBCAS can be at least 99% identical to SEQ ID NO: 17. In some cases, the amino acid sequence encoding a CBCAS can be identical to SEQ ID NO: 17. In some cases, the amino acid sequence can be optimized to correspond to amino acid usage within a specific host organism/cell. The use of a CBCAS in some cases can result in the enzymatic synthesis of cannabichromene (CBC) and the accumulation of CBC within the cell or culture medium.

[0137] The various combinations of enzymes can be used to make a desired product such as olivetolic acid; CBGA; THCA; CBDA; CBCA; THC; CBD; CBC, or any combination thereof.

[0138] The enzymes disclosed throughout can be from a plant. For example, the enzymes can be from a plant that is from the genus Cannabis. More specifically, Cannabis plants that can be used include, but are not limited to Cannabis sativa, Cannabis indica, and Cannabis ruderalis. Other plants that can be used can be from the genus Echinacea, Acmella (e.g., Acmella oleracea), Helichrysum (e.g., Helichrysum umbraculigerum), Radula (e.g., Radula marginata), Theobroma (e.g., Theobroma cacao), and/or Piper (e.g., Piper nigrum).

[0139] Additional enzymes can be added in order to improve the production of CBGA or cannabinoids. For example, a gene encoding an HMG-CoA reductase, such as HMG1, can be used to increase cannabinoid titers. In some instances, the titer of CBGA can be increased by expressing HMG1. Additionally, HMG1 can be in different forms. For example, a truncated form of HMG1 can be used to increase cannabinoid titers. Other enzymes such as Farnesyl pyrophosphate synthetase, which is encoded by the gene ERG20 can be used to increase cannabinoid/CBGA titers. Additionally, ERG20 can be in different forms, such as mutant forms.

[0140] In cases where a HMG-CoA reductase (HMG1) is desired, the HMG1 can be encoded by an amino acid sequence that is substantially identical to SEQ ID NO: 19 or 21. For example, the HMG1 can be encoded by an amino acid sequence that is at least 50%, 60%, 70%, 80%, 85%, 90%, 95%, 96%, 97%, 98% or 99% identical to any one of SEQ ID NO: 19 or 21. In some cases, the HMG1 can be at least 50% identical to SEQ ID NO: 19 or 21. In some cases, the HMG1 can be at least 60% identical to SEQ ID NO: 19 or 21. In some cases, the HMG1 can be at least 65% identical to SEQ ID NO: 19 or 21. In some cases, the HMG1 can be at least 70% identical to SEQ ID NO: 19 or 21. In some cases, the HMG1 can be at least 75% identical to SEQ ID NO: 19 or 21. In some cases, the HMG1 can be at least 80% identical to SEQ ID NO: 19 or 21. In some cases, the HMG1 can be at least 81% identical to SEQ ID NO: 19 or 21. In some cases, the HMG1 can be at least 82% identical to SEQ ID NO: 19 or 21. In some cases, the HMG1 can be at least 83% identical to SEQ ID NO: 19 or 21. In some cases, the HMG1 can be at least 84% identical to SEQ ID NO: 19 or 21. In some cases, the HMG1 can be at least 85% identical to SEQ ID NO: 19 or 21. In some cases, the HMG1 can be at least 86% identical to SEQ ID NO: 19 or 21. In some cases, the HMG1 can be at least 87% identical to SEQ ID NO: 19 or 21. In some cases, the HMG1 can be at least 88% identical to SEQ ID NO: 19 or 21. In some cases, the HMG1 can be at least 89% identical to SEQ ID NO: 19 or 21. In some cases, the HMG1 can be at least 90% identical to SEQ ID NO: 19 or 21. In some cases, the HMG1 can be at least 91% identical to SEQ ID NO: 19 or 21. In some cases, the HMG1 can be at least 92% identical to SEQ ID NO: 19 or 21. In some cases, the HMG1 can be at least 93% identical to SEQ ID NO: 19 or 21. In some cases, the HMG1 can be at least 94% identical to SEQ ID NO: 19 or 21. In some cases, the HMG1 can be at least 95% identical to SEQ ID NO: 19 or 21. In some cases, the HMG1 can be at least 96% identical to SEQ ID NO: 19 or 21. In some cases, the HMG1 can be at least 97% identical to SEQ ID NO: 19 or 21. In some cases, the HMG1 can be at least 98% identical to SEQ ID NO: 19 or 21. In some cases, the HMG1 can be at least 99% identical to SEQ ID NO: 19 or 21. In some cases, the HMG1 can be identical to SEQ ID NO: 19 or 21. Further, codon optimized polynucleotides (for a particular host cell/organism) for the above referenced sequences can be used herein.

[0141] In cases where a farnesyl pyrophosphate synthetase (ERG20) is used, the ERG20 can be encoded by a nucleic acid sequence that is substantially identical to SEQ ID NO: 23. For example, the ERG20 can be encoded by an amino acid sequence that is at least 50%, 60%, 70%, 80%, 85%, 90%, 95%, 96%, 97%, 98% or 99% identical to any one of SEQ ID NO: 23. In some cases, the ERG20 can be at least 50% identical to SEQ ID NO: 23. In some cases, the ERG20 can be at least 60% identical to SEQ ID NO: 23. In some cases, the ERG20 can be at least 65% identical to SEQ ID NO: 23. In some cases, the ERG20 can be at least 70% identical to SEQ ID NO: 23. In some cases, the ERG20 can be at least 75% identical to SEQ ID NO: 23. In some cases, the ERG20 can be at least 80% identical to SEQ ID NO: 23. In some cases, the ERG20 can be at least 81% identical to SEQ ID NO: 23. In some cases, the ERG20 can be at least 82% identical to SEQ ID NO: 23. In some cases, the ERG20 can be at least 83% identical to SEQ ID NO: 23. In some cases, the ERG20 can be at least 84% identical to SEQ ID NO: 23. In some cases, the ERG20 can be at least 85% identical to SEQ ID NO: 23. In some cases, the ERG20 can be at least 86% identical to SEQ ID NO: 23. In some cases, the ERG20 can be at least 87% identical to SEQ ID NO: 23. In some cases, the ERG20 can be at least 88% identical to SEQ ID NO: 23. In some cases, the ERG20 can be at least 89% identical to SEQ ID NO: 23. In some cases, the ERG20 can be at least 90% identical to SEQ ID NO: 23. In some cases, the ERG20 can be at least 91% identical to SEQ ID NO: 23. In some cases, the ERG20 can be at least 92% identical to SEQ ID NO: 23. In some cases, the ERG20 can be at least 93% identical to SEQ ID NO: 23. In some cases, the ERG20 can be at least 94% identical to SEQ ID NO: 23. In some cases, the ERG20 can be at least 95% identical to SEQ ID NO: 23. In some cases, the ERG20 can be at least 96% identical to SEQ ID NO: 23. In some cases, the ERG20 can be at least 97% identical to SEQ ID NO: 23. In some cases, the ERG20 can be at least 98% identical to SEQ ID NO: 23. In some cases, the ERG20 can be at least 99% identical to SEQ ID NO: 23. In some cases, the ERG20 can be identical to SEQ ID NO: 23. Further, codon optimized polynucleotides (for a particular host cell/organism) for the above referenced sequences can be used herein.

[0142] In some cases, the enzymes described herein can be a fragment thereof. The fragment can still retain its respective biological activity. For example, a fragment of the prenyltransferase can be used as long as the activity of the fragment retains its biological activity.

[0143] The enzymes or fragments thereof described throughout can also be in some cases can be fused or linked together. Any fragment linker can be used to link the two or more of the enzymes or fragments thereof together. In some cases, the linker can be any random array of amino acid sequences. In some cases, linkers such as the T2A linker (SEQ ID NO: 15 (amino acid) or 16 (nucleic acid)) can be used.

[0144] The fused or linked enzymes can be two or more of any of the enzymes described throughout. For example, the disclosed prenyltransferase can be linked with a CBDA synthase. The resulting fused or linked enzyme can produce increased cannabidiol titers compared to separate enzymes that are not linked or fused. Additionally, other enzymes such as prenyltransferase and THCA synthase can be fused or linked. The resulting fused or linked enzyme can produce increased THC titers compared to separate enzymes that are not linked or fused. Enzymes that can catalyze the product of another enzyme can be fused or linked. For example AAE1 can be fused or linked to PKS. In some cases, OAC can be fused or linked to PKS. This can in some cases, increase the speed of two or more enzymatic conversions due to the proximity of the enzymatic substrates/products.

[0145] Vectors

[0146] Polynucleotide constructs prepared for introduction into a prokaryotic or eukaryotic host can typically, but not always, comprise a replication system (i.e. vector) recognized by the host, including the intended polynucleotide fragment encoding the desired polypeptide, and can but not necessarily, also include transcription and translational initiation regulatory sequences operably linked to the polypeptide-encoding segment. Expression systems (such as expression vectors) can include, for example, an origin of replication or autonomously replicating sequence (ARS) and expression control sequences, a promoter, an enhancer and necessary processing information sites, such as ribosome-binding sites, RNA splice sites, polyadenylation sites, transcriptional terminator sequences, mRNA stabilizing sequences, nucleotide sequences homologous to host chromosomal DNA, and/or a multiple cloning site. Signal peptides can also be included where appropriate, for example from secreted polypeptides of the same or related species, which allow the protein to cross and/or lodge in cell membranes or be secreted from the cell.

[0147] The vectors can be constructed using standard methods (see, e.g., Sambrook et al., Molecular Biology: A Laboratory Manual, Cold Spring Harbor, N.Y. 1989; and Ausubel, et al., Current Protocols in Molecular Biology, Greene Publishing, Co. N.Y, 1995).

[0148] The manipulation of polynucleotides that encode the enzymes disclosed herein is typically carried out in recombinant vectors. Numerous vectors are publicly available, including bacterial plasmids, bacteriophage, artificial chromosomes, episomal vectors and gene expression vectors, which can all be employed. A vector can be selected to accommodate a polynucleotide encoding a protein of a desired size. Following recombinant modification of a selected vector, a suitable host cell (e.g., the microorganisms described herein) is transfected or transformed with the vector. Each vector contains various functional components, which generally include a cloning site, an origin of replication and at least one selectable marker gene. A vector can additionally possess one or more of the following elements: an enhancer, promoter, and transcription termination and/or other signal sequences. Such sequence elements can be optimized for the selected host species. Such sequence elements can be positioned in the vicinity of the cloning site, such that they are operatively linked to the gene encoding a preselected enzyme.

[0149] Vectors, including cloning and expression vectors, can contain nucleic acid sequences that enable the vector to replicate in one or more selected microorganisms. For example, the sequence can be one that enables the vector to replicate independently of the host chromosomal DNA and can include origins of replication or autonomously replicating sequences. Such sequences are well known for a variety of bacteria, yeast and viruses. For example, the origin of replication from the plasmid pBR322 is suitable for most Gram-negative bacteria, the 2 micron plasmid origin is suitable for yeast, and various viral origins (e.g. SV40, adenovirus) are useful for cloning vectors.

[0150] A cloning or expression vector can contain a selection gene (also referred to as a selectable marker). This gene encodes a protein necessary for the survival or growth of transformed microorganisms in a selective culture medium. Microorganisms not transformed with the vector containing the selection gene will therefore not survive in the culture medium. Typical selection genes encode proteins that confer resistance to antibiotics and other toxins, e.g. ampicillin, neomycin, methotrexate, hygromycin, thiostrepton, apramycin or tetracycline, complement auxotrophic deficiencies, or supply critical nutrients not available in the growth media.

[0151] The replication of vectors can be performed in E. coli. An E. coli-selectable marker, for example, the β-lactamase gene that confers resistance to the antibiotic ampicillin, can be of use. These selectable markers can be obtained from E. coli plasmids, such as pBR322 or a pUC plasmid such as pUC18 or pUC19, or pUC119.

[0152] Some exemplary vectors that can be used in the methods and microorganisms/cells are SEQ ID NO: 3 and 4. SEQ ID NO: 3 is also called the RUNM000898_511.1 vector, which comprises a Saccharomyces cerevisiae 2μ replication origin, a URA3 gene as an auxotrophic marker and the PKS and OAC genes under the regulation of the bidirectional GAL1/GAL10 promoter. SEQ ID NO: 4 is the bCBGA0098 vector that comprises a Saccharomyces cerevisiae 2μ replication origin, a LEU2 gene as an auxotrophic marker, and the AAE1 and PT genes under the regulation of the bidirectional GAL1/GAL10 promoter.

[0153] SEQ ID NO: 25 is a bCBGA0306 is a vector that comprises the Saccharomyces cerevisiae 2μ replication origin, the LEU2 gene as an auxotrophic marker and the PT gene under the regulation of the bidirectional GAL1/GAL10 promoter.

[0154] SEQ ID NO: 34 is the RUNM001233_51.1 vector comprising the Saccharomyces cerevisiae 2μ replication origin, the URA3 gene as an auxotrophic marker and the THCA synthase gene under the regulation of the bidirectional GAL1/GAL10 promoter.

[0155] SEQ ID NO: 35 is the RUNM001210_96.1 vector comprising the Saccharomyces cerevisiae 2μ replication origin, the URA3 gene as an auxotrophic marker, the PKS and OAC genes under the regulation of the bidirectional GAL1/GAL10 promoter and the AAE1 gene under the regulation of the STE5 promoter.

[0156] SEQ ID NO: 36 is the bCBGA0409 vector comprising the Saccharomyces cerevisiae 2μ replication origin, the LEU2 gene as an auxotrophic marker, the THCA synthase and PT genes under the regulation of the bidirectional GAL1/GAL10 promoter.

[0157] SEQ ID NO: 29 is the bCBGA0385 vector comprising the Saccharomyces cerevisiae 2μ replication origin, the LEU2 gene as an auxotrophic marker and the GFP-dPT gene under the regulation of the bidirectional GAL1/GAL10 promoter.

[0158] SEQ ID NO: 30 is the bCBGA0305 vector comprising the Saccharomyces cerevisiae 2μ replication origin, the TRP1 gene as an auxotrophic marker and the AAE1 gene under the regulation of the bidirectional GAL1/GAL10 promoter.

[0159] SEQ ID NO: 33 is the bCBGA0559 vector comprising the Saccharomyces cerevisiae 2μ replication origin, the LEU2 gene as an auxotrophic marker and the ERG20mut-dPT gene under the regulation of the bidirectional GAL1/GAL10 promoter.

[0160] Promoters

[0161] Vectors can contain a promoter that is recognized by the host microorganism. The promoter can be operably linked to a coding sequence of interest. Such a promoter can be inducible or constitutive. Polynucleotides are operably linked when the polynucleotides are in a relationship permitting them to function in their intended manner.

[0162] Different promoters can be used to drive the expression of the genes. For example, if temporary gene expression (i.e., non-constitutively expressed) is desired, expression can be driven by inducible promoters.

[0163] In some cases, some of the genes disclosed can be expressed temporarily. In other words, the genes are not constitutively expressed. The expression of the genes can be driven by inducible or repressible promoters. For example, the inducible or repressible promoters that can be used include but are not limited to: (a) sugars such as arabinose and lactose (or non metabolizable analogs, e.g., isopropyl β-D-1-thiogalactopyranoside (IPTG)); (b) metals such as lanthanum, copper, calcium; (c) temperature; (d) Nitrogen-source; (e) oxygen; (f) cell state (growth or stationary); (g) metabolites such as phosphate; (h) CRISPRi; (i) jun; (j) fos, (k) metallothionein and/or (l) heat shock.

[0164] Constitutively expressed promoters can also be used in the vector systems herein. For example, the expression of some of the genes disclosed throughout can be controlled by constitutively active promoters. For examples, the promoters that can be used include but are not limited to p.Bba.J23111, J23111, and J23100.

[0165] Promoters suitable for use with prokaryotic hosts can, for example, include but are not limited to the a-lactamase and lactose promoter systems, alkaline phosphatase, the tryptophan (trp) promoter system, the erythromycin promoter, apramycin promoter, hygromycin promoter, methylenomycin promoter and hybrid promoters such as the tac promoter. Promoters for use in bacterial systems will also generally contain a Shine-Dalgarno sequence operably linked to the coding sequence.

[0166] Generally, a strong promoter can be employed to provide for high level transcription and expression of the desired product.

[0167] One or more promoters of a transcription unit can be an inducible promoter. For example, a GFP can be expressed from a constitutive promoter while an inducible promoter drives transcription of a gene coding for one or more enzymes as disclosed herein and/or the amplifiable selectable marker.

[0168] Some vectors can contain prokaryotic sequences that facilitate the propagation of the vector in bacteria. Thus, the vectors can have other components such as an origin of replication (e.g., a nucleic acid sequence that enables the vector to replicate in one or more selected microorganisms), antibiotic resistance genes for selection in bacteria, and/or an amber stop codon which can permit translation to read through the codon. Additional selectable gene(s) can also be incorporated. Generally, in cloning vectors the origin of replication is one that enables the vector to replicate independently of the host chromosomal DNA, and includes origins of replication or autonomously replicating sequences. Such sequences can include the ColEl origin of replication in bacteria or other known sequences.

[0169] Genes

[0170] The genetically modified microorganisms can comprise a nucleic acid sequence encoding for one or more enzymes that are capable of catalyzing one or more of the following reactions: hexanoic acid to hexanoyl-CoA; hexanoyl-CoA to olivetolic Acid; olivetolic Acid to CBGA; CBGA to THCA; CBGA to CBDA; CBGA to CBCA; THCA to THC; CBDA to CBD; or CBCA to CBC. For example, the genetically modified microorganism can comprise a nucleic acid sequence encoding for one or more of the following enzymes: acyl activating enzyme (AAE1); polyketide synthase (PKS); olivetolic acid cyclase (OAC); prenyltransferase (PT); THCA synthase (THCAS); CBDA synthase (CBDAS), CBCA synthase (CBCAS); or any combination thereof. The nucleic acid sequence in some cases can be within a vector. In some cases, the nucleic acid sequences do not need to be within a vector but rather integrated into the microorganism's genome or isolated. In some cases, the isolated nucleic acids can be inserted into the genome of the cell/microorganism used. In some cases, the isolated nucleic acid is inserted into the genome at a specific locus, where the isolated nucleic acid can be expressed in sufficient amounts.

[0171] In some cases, two or more genes encoding for consecutive enzymes in the pathway from a carbon substrate (e.g., sugar) to any of the cannabinoids described throughout (e.g., THCA, CBDA, CBCA, THC, CBD, or CBC) can be used. In some cases, three or more genes encoding for consecutive enzymes in the pathway can be used. In some cases, four or more genes encoding for consecutive enzymes in the pathway can be used. In some cases, five or more genes encoding for consecutive enzymes in the pathway can be used. In some cases, six or more genes encoding for consecutive enzymes in the pathway can be used. In some cases, seven or more genes encoding for consecutive enzymes in the pathway can be used. In some cases, eight or more genes encoding for consecutive enzymes in the pathway can be used. In some cases, nine or more genes encoding for consecutive enzymes in the pathway can be used. In some cases, ten or more genes encoding for consecutive enzymes in the pathway can be used.

[0172] In some cases, when an acyl activating enzyme (AAE1) is desired, the AAE1 can be encoded by a nucleic acid sequence that is substantially identical to SEQ ID NO: 14. For example, the AAE1 can be encoded by a polynucleotide that is at least 50%, 60%, 70%, 80%, 85%, 90%, 95%, 96%, 97%, 98% or 99% identical to SEQ ID NO: 14. In some cases, the AAE1 can be at least 50% identical to SEQ ID NO: 14. In some cases, the AAE1 can be at least 60% identical to SEQ ID NO: 14. In some cases, the AAE1 can be at least 65% identical to SEQ ID NO: 14. In some cases, the AAE1 can be at least 70% identical to SEQ ID NO: 14. In some cases, the AAE1 can be at least 75% identical to SEQ ID NO: 14. In some cases, the AAE1 can be at least 80% identical to SEQ ID NO: 14. In some cases, the AAE1 can be at least 81% identical to SEQ ID NO: 14. In some cases, the AAE1 can be at least 82% identical to SEQ ID NO: 14. In some cases, the AAE1 can be at least 83% identical to SEQ ID NO: 14. In some cases, the AAE1 can be at least 84% identical to SEQ ID NO: 14. In some cases, the AAE1 can be at least 85% identical to SEQ ID NO: 14. In some cases, the AAE1 can be at least 86% identical to SEQ ID NO: 14. In some cases, the AAE1 can be at least 87% identical to SEQ ID NO: 14. In some cases, the AAE1 can be at least 88% identical to SEQ ID NO: 14. In some cases, the AAE1 can be at least 89% identical to SEQ ID NO: 14. In some cases, the AAE1 can be at least 90% identical to SEQ ID NO: 14. In some cases, the AAE1 can be at least 91% identical to SEQ ID NO: 14. In some cases, the AAE1 can be at least 92% identical to SEQ ID NO: 14. In some cases, the AAE1 can be at least 93% identical to SEQ ID NO: 14. In some cases, the AAE1 can be at least 94% identical to SEQ ID NO: 14. In some cases, the AAE1 can be at least 95% identical to SEQ ID NO: 14. In some cases, the AAE1 can be at least 96% identical to SEQ ID NO: 14. In some cases, the AAE1 can be at least 97% identical to SEQ ID NO: 14. In some cases, the AAE1 can be at least 98% identical to SEQ ID NO: 14. In some cases, the AAE1 can be at least 99% identical to SEQ ID NO: 14. In some cases, the AAE1 can be identical to SEQ ID NO: 14. Further, codon optimized polynucleotides (for a particular host cell/organism) for the above referenced sequences can be used herein.

[0173] In cases where a polyketide synthase (PKS) is used, the PKS can be encoded by a nucleic acid sequence that is substantially identical to SEQ ID NO: 6. For example, the PKS can be encoded by a polynucleotide that is at least 50%, 60%, 70%, 80%, 85%, 90%, 95%, 96%, 97%, 98% or 99% identical to SEQ ID NO: 6. In some cases, the PKS can be at least 50% identical to SEQ ID NO: 6. In some cases, the PKS can be at least 60% identical to SEQ ID NO: 6. In some cases, the PKS can be at least 65% identical to SEQ ID NO: 6. In some cases, the PKS can be at least 70% identical to SEQ ID NO: 6. In some cases, the PKS can be at least 75% identical to SEQ ID NO: 6. In some cases, the PKS can be at least 80% identical to SEQ ID NO: 6. In some cases, the PKS can be at least 81% identical to SEQ ID NO: 6. In some cases, the PKS can be at least 82% identical to SEQ ID NO: 6. In some cases, the PKS can be at least 83% identical to SEQ ID NO: 6. In some cases, the PKS can be at least 84% identical to SEQ ID NO: 6. In some cases, the PKS can be at least 85% identical to SEQ ID NO: 6. In some cases, the PKS can be at least 86% identical to SEQ ID NO: 6. In some cases, the PKS can be at least 87% identical to SEQ ID NO: 6. In some cases, the PKS can be at least 88% identical to SEQ ID NO: 6. In some cases, the PKS can be at least 89% identical to SEQ ID NO: 6. In some cases, the PKS can be at least 90% identical to SEQ ID NO: 6. In some cases, the PKS can be at least 91% identical to SEQ ID NO: 6. In some cases, the PKS can be at least 92% identical to SEQ ID NO: 6. In some cases, the PKS can be at least 93% identical to SEQ ID NO: 6. In some cases, the PKS can be at least 94% identical to SEQ ID NO: 6. In some cases, the PKS can be at least 95% identical to SEQ ID NO: 6. In some cases, the PKS can be at least 96% identical to SEQ ID NO: 6. In some cases, the PKS can be at least 97% identical to SEQ ID NO: 6. In some cases, the PKS can be at least 98% identical to SEQ ID NO: 6. In some cases, the PKS can be at least 99% identical to SEQ ID NO: 6. In some cases, the PKS can be identical to SEQ ID NO: 6. Further, codon optimized polynucleotides (for a particular host cell/organism) for the above referenced sequences can be used herein.

[0174] In cases where an olivetolic acid cyclase (OAC) is used, the OAC can be encoded by a nucleic acid sequence that is substantially identical to SEQ ID NO: 8. For example, the OAC can be encoded by a polynucleotide that is at least 50%, 60%, 70%, 80%, 85%, 90%, 95%, 96%, 97%, 98% or 99% identical to SEQ ID NO: 8. In some cases, the OAC can be at least 50% identical to SEQ ID NO: 8. In some cases, the OAC can be at least 60% identical to SEQ ID NO: 8. In some cases, the OAC can be at least 65% identical to SEQ ID NO: 8. In some cases, the OAC can be at least 70% identical to SEQ ID NO: 8. In some cases, the OAC can be at least 75% identical to SEQ ID NO: 8. In some cases, the OAC can be at least 80% identical to SEQ ID NO: 8. In some cases, the OAC can be at least 81% identical to SEQ ID NO: 8. In some cases, the OAC can be at least 82% identical to SEQ ID NO: 8. In some cases, the OAC can be at least 83% identical to SEQ ID NO: 8. In some cases, the OAC can be at least 84% identical to SEQ ID NO: 8. In some cases, the OAC can be at least 85% identical to SEQ ID NO: 8. In some cases, the OAC can be at least 86% identical to SEQ ID NO: 8. In some cases, the OAC can be at least 87% identical to SEQ ID NO: 8. In some cases, the OAC can be at least 88% identical to SEQ ID NO: 8. In some cases, the OAC can be at least 89% identical to SEQ ID NO: 8. In some cases, the OAC can be at least 90% identical to SEQ ID NO: 8. In some cases, the OAC can be at least 91% identical to SEQ ID NO: 8. In some cases, the OAC can be at least 92% identical to SEQ ID NO: 8. In some cases, the OAC can be at least 93% identical to SEQ ID NO: 8. In some cases, the OAC can be at least 94% identical to SEQ ID NO: 8. In some cases, the OAC can be at least 95% identical to SEQ ID NO: 8. In some cases, the OAC can be at least 96% identical to SEQ ID NO: 8. In some cases, the OAC can be at least 97% identical to SEQ ID NO: 8. In some cases, the OAC can be at least 98% identical to SEQ ID NO: 8. In some cases, the OAC can be at least 99% identical to SEQ ID NO: 8. In some cases, the OAC can be identical to SEQ ID NO: 8. Further, codon optimized polynucleotides (for a particular host cell/organism) for the above referenced sequences can be used herein.

[0175] In cases where a prenyltransferase (PT) is used, the PT can be encoded by a nucleic acid sequence that is substantially identical to any one of SEQ ID NOs: 2, 26, 31, or 37. For example, the PT can be encoded by a polynucleotide that is at least 50%, 60%, 70%, 80%, 85%, 90%, 95%, 96%, 97%, 98% or 99% identical to any one of SEQ ID NOs: 2, 26, 31, or 37. In some cases, the PT can be at least 50% identical to any one of SEQ ID NOs: 2, 26, 31, or 37. In some cases, the PT can be at least 60% identical to any one of SEQ ID NOs: 2, 26, 31, or 37. In some cases, the PT can be at least 65% identical to any one of SEQ ID NOs: 2, 26, 31, or 37. In some cases, the PT can be at least 70% identical to any one of SEQ ID NOs: 2, 26, 31, or 37. In some cases, the PT can be at least 75% identical to any one of SEQ ID NOs: 2, 26, 31, or 37. In some cases, the PT can be at least 80% identical to any one of SEQ ID NOs: 2, 26, 31, or 37. In some cases, the PT can be at least 81% identical to any one of SEQ ID NOs: 2, 26, 31, or 37. In some cases, the PT can be at least 82% identical to any one of SEQ ID NOs: 2, 26, 31, or 37. In some cases, the PT can be at least 83% identical to any one of SEQ ID NOs: 2, 26, 31, or 37. In some cases, the PT can be at least 84% identical to any one of SEQ ID NOs: 2, 26, 31, or 37. In some cases, the PT can be at least 85% identical to any one of SEQ ID NOs: 2, 26, 31, or 37. In some cases, the PT can be at least 86% identical to any one of SEQ ID NOs: 2, 26, 31, or 37. In some cases, the PT can be at least 87% identical to any one of SEQ ID NOs: 2, 26, 31, or 37. In some cases, the PT can be at least 88% identical to any one of SEQ ID NOs: 2, 26, 31, or 37. In some cases, the PT can be at least 89% identical to any one of SEQ ID NOs: 2, 26, 31, or 37. In some cases, the PT can be at least 90% identical to any one of SEQ ID NOs: 2, 26, 31, or 37. In some cases, the PT can be at least 91% identical to any one of SEQ ID NOs: 2, 26, 31, or 37. In some cases, the PT can be at least 92% identical to any one of SEQ ID NOs: 2, 26, 31, or 37. In some cases, the PT can be at least 93% identical to any one of SEQ ID NOs: 2, 26, 31, or 37. In some cases, the PT can be at least 94% identical to any one of SEQ ID NOs: 2, 26, 31, or 37. In some cases, the PT can be at least 95% identical to any one of SEQ ID NOs: 2, 26, 31, or 37. In some cases, the PT can be at least 96% identical to any one of SEQ ID NOs: 2, 26, 31, or 37. In some cases, the PT can be at least 97% identical to any one of SEQ ID NOs: 2, 26, 31, or 37. In some cases, the PT can be at least 98% identical to any one of SEQ ID NOs: 2, 26, 31, or 37. In some cases, the PT can be at least 99% identical to any one of SEQ ID NOs: 2, 26, 31, or 37. In some cases, the PT can be identical to any one of SEQ ID NOs: 2, 26, 31, or 37. Further, codon optimized polynucleotides (for a particular host cell/organism) for the above referenced sequences can be used herein.

[0176] In cases where a THCA synthase (THCAS) is used, the THCAS can be encoded by a nucleic acid sequence that is substantially identical to SEQ ID NO: 10. For example, the THCAS can be encoded by a polynucleotide that is at least 50%, 60%, 70%, 80%, 85%, 90%, 95%, 96%, 97%, 98% or 99% identical to SEQ ID NO: 10. In some cases, the THCAS can be at least 50% identical to SEQ ID NO: 10. In some cases, the THCAS can be at least 60% identical to SEQ ID NO: 10. In some cases, the THCAS can be at least 65% identical to SEQ ID NO: 10. In some cases, the THCAS can be at least 70% identical to SEQ ID NO: 10. In some cases, the THCAS can be at least 75% identical to SEQ ID NO: 10. In some cases, the THCAS can be at least 80% identical to SEQ ID NO: 10. In some cases, the THCAS can be at least 81% identical to SEQ ID NO: 10. In some cases, the THCAS can be at least 82% identical to SEQ ID NO: 10. In some cases, the THCAS can be at least 83% identical to SEQ ID NO: 10. In some cases, the THCAS can be at least 84% identical to SEQ ID NO: 10. In some cases, the THCAS can be at least 85% identical to SEQ ID NO: 10. In some cases, the THCAS can be at least 86% identical to SEQ ID NO: 10. In some cases, the THCAS can be at least 87% identical to SEQ ID NO: 10. In some cases, the THCAS can be at least 88% identical to SEQ ID NO: 10. In some cases, the THCAS can be at least 89% identical to SEQ ID NO: 10. In some cases, the THCAS can be at least 90% identical to SEQ ID NO: 10. In some cases, the THCAS can be at least 91% identical to SEQ ID NO: 10. In some cases, the THCAS can be at least 92% identical to SEQ ID NO: 10. In some cases, the THCAS can be at least 93% identical to SEQ ID NO: 10. In some cases, the THCAS can be at least 94% identical to SEQ ID NO: 10. In some cases, the THCAS can be at least 95% identical to SEQ ID NO: 10. In some cases, the THCAS can be at least 96% identical to SEQ ID NO: 10. In some cases, the THCAS can be at least 97% identical to SEQ ID NO: 10. In some cases, the THCAS can be at least 98% identical to SEQ ID NO: 10. In some cases, the THCAS can be at least 99% identical to SEQ ID NO: 10. In some cases, the THCAS can be identical to SEQ ID NO: 10. Further, codon optimized polynucleotides (for a particular host cell/organism) for the above referenced sequences can be used herein.

[0177] In cases where a CBDA synthase (CBDAS) is used, the CBDAS can be encoded by a nucleic acid sequence that is substantially identical to SEQ ID NO: 12. For example, the CBDAS can be encoded by a polynucleotide that is at least 50%, 60%, 70%, 80%, 85%, 90%, 95%, 96%, 97%, 98% or 99% identical to SEQ ID NO: 12. In some cases, the CBDAS can be at least 50% identical to SEQ ID NO: 12. In some cases, the CBDAS can be at least 60% identical to SEQ ID NO: 12. In some cases, the CBDAS can be at least 65% identical to SEQ ID NO: 12. In some cases, the CBDAS can be at least 70% identical to SEQ ID NO: 12. In some cases, the CBDAS can be at least 75% identical to SEQ ID NO: 12. In some cases, the CBDAS can be at least 80% identical to SEQ ID NO: 12. In some cases, the CBDAS can be at least 81% identical to SEQ ID NO: 12. In some cases, the CBDAS can be at least 82% identical to SEQ ID NO: 12. In some cases, the CBDAS can be at least 83% identical to SEQ ID NO: 12. In some cases, the CBDAS can be at least 84% identical to SEQ ID NO: 12. In some cases, the CBDAS can be at least 85% identical to SEQ ID NO: 12. In some cases, the CBDAS can be at least 86% identical to SEQ ID NO: 12. In some cases, the CBDAS can be at least 87% identical to SEQ ID NO: 12. In some cases, the CBDAS can be at least 88% identical to SEQ ID NO: 12. In some cases, the CBDAS can be at least 89% identical to SEQ ID NO: 12. In some cases, the CBDAS can be at least 90% identical to SEQ ID NO: 12. In some cases, the CBDAS can be at least 91% identical to SEQ ID NO: 12. In some cases, the CBDAS can be at least 92% identical to SEQ ID NO: 12. In some cases, the CBDAS can be at least 93% identical to SEQ ID NO: 12. In some cases, the CBDAS can be at least 94% identical to SEQ ID NO: 12. In some cases, the CBDAS can be at least 95% identical to SEQ ID NO: 12. In some cases, the CBDAS can be at least 96% identical to SEQ ID NO: 12. In some cases, the CBDAS can be at least 97% identical to SEQ ID NO: 12. In some cases, the CBDAS can be at least 98% identical to SEQ ID NO: 12. In some cases, the CBDAS can be at least 99% identical to SEQ ID NO: 12. In some cases, the CBDAS can be identical to SEQ ID NO: 12. Further, codon optimized polynucleotides (for a particular host cell/organism) for the above referenced sequences can be used herein.

[0178] In cases where a CBCA synthase (CBCAS) is used, the CBCAS can be encoded by a nucleic acid sequence that is substantially identical to SEQ ID NO: 18. For example, the CBCAS can be encoded by a polynucleotide that is at least 50%, 60%, 70%, 80%, 85%, 90%, 95%, 96%, 97%, 98% or 99% identical to SEQ ID NO: 18. In some cases, the CBCAS can be at least 50% identical to SEQ ID NO: 18. In some cases, the CBCAS can be at least 60% identical to SEQ ID NO: 18. In some cases, the CBCAS can be at least 65% identical to SEQ ID NO: 18. In some cases, the CBCAS can be at least 70% identical to SEQ ID NO: 18. In some cases, the CBCAS can be at least 75% identical to SEQ ID NO: 18. In some cases, the CBCAS can be at least 80% identical to SEQ ID NO: 18. In some cases, the CBCAS can be at least 81% identical to SEQ ID NO: 18. In some cases, the CBCAS can be at least 82% identical to SEQ ID NO: 18. In some cases, the CBCAS can be at least 83% identical to SEQ ID NO: 18. In some cases, the CBCAS can be at least 84% identical to SEQ ID NO: 18. In some cases, the CBCAS can be at least 85% identical to SEQ ID NO: 18. In some cases, the CBCAS can be at least 86% identical to SEQ ID NO: 18. In some cases, the CBCAS can be at least 87% identical to SEQ ID NO: 18. In some cases, the CBCAS can be at least 88% identical to SEQ ID NO: 18. In some cases, the CBCAS can be at least 89% identical to SEQ ID NO: 18. In some cases, the CBCAS can be at least 90% identical to SEQ ID NO: 18. In some cases, the CBCAS can be at least 91% identical to SEQ ID NO: 18. In some cases, the CBCAS can be at least 92% identical to SEQ ID NO: 18. In some cases, the CBCAS can be at least 93% identical to SEQ ID NO: 18. In some cases, the CBCAS can be at least 94% identical to SEQ ID NO: 18. In some cases, the CBCAS can be at least 95% identical to SEQ ID NO: 18. In some cases, the CBCAS can be at least 96% identical to SEQ ID NO: 18. In some cases, the CBCAS can be at least 97% identical to SEQ ID NO: 18. In some cases, the CBCAS can be at least 98% identical to SEQ ID NO: 18. In some cases, the CBCAS can be at least 99% identical to SEQ ID NO: 18. In some cases, the CBCAS can be identical to SEQ ID NO: 18. Further, codon optimized polynucleotides (for a particular host cell/organism) for the above referenced sequences can be used herein.

[0179] The genetically modified microorganism can also further comprise one or more nucleic acids encoding for enzymes (in some cases heterologous enzymes), including but not limited to HMG1, ERG20, and/or isoforms and mutants thereof.

[0180] In cases where a HMG-CoA reductase (HMG1) is used, the HMG1 can be encoded by a nucleic acid sequence that is substantially identical to SEQ ID NO: 20 or 22. For example, the HMG1 can be encoded by a polynucleotide that is at least 50%, 60%, 70%, 80%, 85%, 90%, 95%, 96%, 97%, 98% or 99% identical to SEQ ID NO: 20 or 22. In some cases, the HMG1 can be at least 50% identical to SEQ ID NO: 20 or 22. In some cases, the HMG1 can be at least 60% identical to SEQ ID NO: 20 or 22. In some cases, the HMG1 can be at least 65% identical to SEQ ID NO: 20 or 22. In some cases, the HMG1 can be at least 70% identical to SEQ ID NO: 20 or 22. In some cases, the HMG1 can be at least 75% identical to SEQ ID NO: 20 or 22. In some cases, the HMG1 can be at least 80% identical to SEQ ID NO: 20 or 22. In some cases, the HMG1 can be at least 81% identical to SEQ ID NO: 20 or 22. In some cases, the HMG1 can be at least 82% identical to SEQ ID NO: 20 or 22. In some cases, the HMG1 can be at least 83% identical to SEQ ID NO: 20 or 22. In some cases, the HMG1 can be at least 84% identical to SEQ ID NO: 20 or 22. In some cases, the HMG1 can be at least 85% identical to SEQ ID NO: 20 or 22. In some cases, the HMG1 can be at least 86% identical to SEQ ID NO: 20 or 22. In some cases, the HMG1 can be at least 87% identical to SEQ ID NO: 20 or 22. In some cases, the HMG1 can be at least 88% identical to SEQ ID NO: 20 or 22. In some cases, the HMG1 can be at least 89% identical to SEQ ID NO: 20 or 22. In some cases, the HMG1 can be at least 90% identical to SEQ ID NO: 20 or 22. In some cases, the HMG1 can be at least 91% identical to SEQ ID NO: 20 or 22. In some cases, the HMG1 can be at least 92% identical to SEQ ID NO: 20 or 22. In some cases, the HMG1 can be at least 93% identical to SEQ ID NO: 20 or 22. In some cases, the HMG1 can be at least 94% identical to SEQ ID NO: 20 or 22. In some cases, the HMG1 can be at least 95% identical to SEQ ID NO: 20 or 22. In some cases, the HMG1 can be at least 96% identical to SEQ ID NO: 20 or 22. In some cases, the HMG1 can be at least 97% identical to SEQ ID NO: 20 or 22. In some cases, the HMG1 can be at least 98% identical to SEQ ID NO: 20 or 22. In some cases, the HMG1 can be at least 99% identical to SEQ ID NO: 20 or 22. In some cases, the HMG1 can be identical to SEQ ID NO: 20 or 22. Further, codon optimized polynucleotides (for a particular host cell/organism) for the above referenced sequences can be used herein.

[0181] In cases where a farnesyl pyrophosphate synthetase (ERG20) is used, the ERG20 can be encoded by a nucleic acid sequence that is substantially identical to SEQ ID NO: 24. For example, the ERG20 can be encoded by a polynucleotide that is at least 50%, 60%, 70%, 80%, 85%, 90%, 95%, 96%, 97%, 98% or 99% identical to SEQ ID NO: 24. In some cases, the ERG20 can be at least 50% identical to SEQ ID NO: 24. In some cases, the ERG20 can be at least 60% identical to SEQ ID NO: 24. In some cases, the ERG20 can be at least 65% identical to SEQ ID NO: 24. In some cases, the ERG20 can be at least 70% identical to SEQ ID NO: 24. In some cases, the ERG20 can be at least 75% identical to SEQ ID NO: 24. In some cases, the ERG20 can be at least 80% identical to SEQ ID NO: 24. In some cases, the ERG20 can be at least 81% identical to SEQ ID NO: 24. In some cases, the ERG20 can be at least 82% identical to SEQ ID NO: 24. In some cases, the ERG20 can be at least 83% identical to SEQ ID NO: 24. In some cases, the ERG20 can be at least 84% identical to SEQ ID NO: 24. In some cases, the ERG20 can be at least 85% identical to SEQ ID NO: 24. In some cases, the ERG20 can be at least 86% identical to SEQ ID NO: 24. In some cases, the ERG20 can be at least 87% identical to SEQ ID NO: 24. In some cases, the ERG20 can be at least 88% identical to SEQ ID NO: 24. In some cases, the ERG20 can be at least 89% identical to SEQ ID NO: 24. In some cases, the ERG20 can be at least 90% identical to SEQ ID NO: 24. In some cases, the ERG20 can be at least 91% identical to SEQ ID NO: 24. In some cases, the ERG20 can be at least 92% identical to SEQ ID NO: 24. In some cases, the ERG20 can be at least 93% identical to SEQ ID NO: 24. In some cases, the ERG20 can be at least 94% identical to SEQ ID NO: 24. In some cases, the ERG20 can be at least 95% identical to SEQ ID NO: 24. In some cases, the ERG20 can be at least 96% identical to SEQ ID NO: 24. In some cases, the ERG20 can be at least 97% identical to SEQ ID NO: 24. In some cases, the ERG20 can be at least 98% identical to SEQ ID NO: 24. In some cases, the ERG20 can be at least 99% identical to SEQ ID NO: 24. In some cases, the ERG20 can be identical to SEQ ID NO: 24. Further, codon optimized polynucleotides (for a particular host cell/organism) for the above referenced sequences can be used herein.

### Modifying Endogenous Gene Expression

[0182] The genetically modified microorganisms disclosed herein can have their endogenous genes regulated. This can be useful, for example, when there is negative feedback to the expression of a desired polypeptide, such as any of the enzymes described throughout including but not limited to acyl activating enzyme (AAE1); polyketide synthase (PKS); olivetolic acid cyclase (OAC); prenyltransferase (PT); THCA synthase (THCAS); CBDA synthase (CBDAS), CBCA synthase (CBCAS); HMG-CoA reductase (HMG1); farnesyl pyrophosphate synthetase (ERG20); or any combination thereof. Modifying one or more negative regulator can lead to increased expression of a desired polypeptide, and in some cases, increase the production level of the cannabinoids.

[0183] Modifying the expression of endogenous genes can be achieved in a variety of ways. For example, antisense or RNA interference approaches can be used to down-regulate expression of the polynucleotides of the present disclosure, e.g., as a further mechanism for modulating cellular phenotype. That is, antisense sequences of the polynucleotides of the present disclosure, or subsequences thereof, can be used to block expression of naturally occurring homologous polynucleotide sequences. In particular, constructs comprising a desired polypeptide coding sequence, including fragments thereof, in antisense orientation, or combinations of sense and antisense orientation, can be used to decrease or effectively eliminate the expression of the desired polypeptide in a cell or plant and obtain an improvement in shelf life as is described herein. Accordingly, this can be used to “knock-out” the desired polypeptide or homologous sequences thereof. A variety of sense and antisense technologies, e.g., as set forth in Lichtenstein and Nellen (Antisense Technology: A Practical Approach IRL Press at Oxford University, Oxford, England, 1997), can be used. Sense or antisense polynucleotide can be introduced into a cell, where they are transcribed. Such polynucleotides can include both simple oligonucleotide sequences and catalytic sequences such as ribozymes.

[0184] Other methods for a reducing or eliminating expression (i.e., a “knock-out” or “knockdown”) of a desired polypeptide in a transgenic cell or plant can be done by introduction of a construct which expresses an antisense of the desired polypeptide coding strand or fragment thereof. For antisense suppression, the desired polypeptide cDNA or fragment thereof is arranged in reverse orientation (with respect to the coding sequence) relative to the promoter sequence in the expression vector. Further, the introduced sequence need not always correspond to the full length cDNA or gene, and need not be identical to the cDNA or gene found in the cell or plant to be transformed.

[0185] Additionally, the antisense sequence need only be capable of hybridizing to the target gene or RNA of interest. Thus, where the introduced polynucleotide sequence is of shorter length, a higher degree of homology to the endogenous transcription factor sequence will be needed for effective antisense suppression. While antisense sequences of various lengths can be utilized, in some embodiments, the introduced antisense polynucleotide sequence in the vector is at least 10, 20, 30, 40, 50, 100 or more nucleotides in length in certain embodiments. Transcription of an antisense construct as described results in the production of RNA molecules that comprise a sequence that is the reverse complement of the mRNA molecules transcribed from the endogenous gene to be repressed.

[0186] Other methods for a reducing or eliminating expression can be done by introduction of a construct that expresses siRNA that targets a desired polypeptide (e.g., CBGA synthesis polypeptide). In certain embodiments, siRNAs are short (20 to 24-bp) double-stranded RNA (dsRNA) with phosphorylated 5′ ends and hydroxylated 3′ ends with two overhanging nucleotides.

[0187] Other methods for a reducing or eliminating expression can be done by insertion mutagenesis using the T-DNA of Agrobacterium tumefaciens or a selection marker cassette or any other non-sense DNA fragments. After generating the insertion mutants, the mutants can be screened to identify those containing the insertion in the CBGA synthesis polypeptide (or other desired polypeptide) gene. Plants containing one or more transgene insertion events at the desired gene can be crossed to generate homozygous plant for the mutation, as described in Koncz et al., (Methods in Arabidopsis Research; World Scientific, 1992).

[0188] Suppression of gene expression can also be achieved using a ribozyme. Ribozymes are RNA molecules that possess highly specific endoribonuclease activity. The production and use of ribozymes are disclosed in U.S. Pat. Nos. 4,987,071 and 5,543,508. Synthetic ribozyme sequences including antisense RNAs can be used to confer RNA cleaving activity on the antisense RNA, such that endogenous mRNA molecules that hybridize to the antisense RNA are cleaved, which in turn leads to an enhanced antisense inhibition of endogenous gene expression.

[0189] A cell or plant gene can also be modified by using the Cre-lox system (for example, as described in U.S. Pat. No. 5,658,772). A cellular or plant genome can be modified to include first and second lox sites that are then contacted with a Cre recombinase. If the lox sites are in the same orientation, the intervening DNA sequence between the two sites is excised. If the lox sites are in the opposite orientation, the intervening sequence is inverted.

[0190] In addition, silencing approach using short hairpin RNA (shRNA) system, and complementary mature CRISPR RNA (crRNA) by CRISPR/Cas system, and virus inducing gene silencing (VIGS) system can also be used to make down regulated or knockout of synthase mutants. Dominant negative approaches can also be used to make down regulated or knockout of desired polypeptides.

[0191] The RNA-guided endonuclease can be derived from a clustered regularly interspersed short palindromic repeats (CRISPR)/CRISPR-associated (Cas) system. The CRISPR/Cas system can be a type I, a type II, or a type III system. Non-limiting examples of suitable CRISPR/Cas proteins include Cas3, Cas4, Cas5, Cas5e (or CasD), Cas6, Cas6e, Cas6f, Cas7, Cas8a1, Cas8a2, Cas8b, Cas8c, Cas9, Cask), Cas10d, CasF, CasG, CasH, Csy1, Csy2, Csy3, Cse1 (or CasA), Cse2 (or CasB), Cse3 (or CasE), Cse4 (or CasC), Csc1, Csc2, Csa5, Csn2, Csm2, Csm3, Csm4, Csm5, Csm6, Cmr1, Cmr3, Cmr4, Cmr5, Cmr6, Csb1, Csb2, Csb3, Csx17, Csx14, Csx10, Csx16, CsaX, Csx3, Csz1, Csx15, Csf1, Csf2, Csf3, Csf4, and Cul966.

[0192] In general, CRISPR/Cas proteins comprise at least one RNA recognition and/or RNA binding domain. RNA recognition and/or RNA binding domains interact with guide RNAs. CRISPR/Cas proteins can also comprise nuclease domains (i.e., DNase or RNase domains), DNA binding domains, helicase domains, RNAse domains, protein-protein interaction domains, dimerization domains, as well as other domains.

[0193] The CRISPR/Cas-like protein can be a wild type CRISPR/Cas protein, a modified CRISPR/Cas protein, or a fragment of a wild type or modified CRISPR/Cas protein. The CRISPR/Cas-like protein can be modified to increase nucleic acid binding affinity and/or specificity, alter an enzyme activity, and/or change another property of the protein. For example, nuclease (i.e., DNase, RNase) domains of the CRISPR/Cas-like protein can be modified, deleted, or inactivated. Alternatively, the CRISPR/Cas-like protein can be truncated to remove domains that are not essential for the function of the fusion protein. The CRISPR/Cas-like protein can also be truncated or modified to optimize the activity of the effector domain of the fusion protein.

[0194] One method to silence a desired gene (or a CBGA synthesis polypeptide gene) is virus induced gene silencing (known to the art as VIGS). In general, in plants infected with unmodified viruses, the viral genome is targeted. However, when viral vectors have been modified to carry inserts derived from host genes (e.g. portions of sequences encoding a desired polypeptide such as CBGA synthesis polypeptide), the process is additionally targeted against the corresponding mRNAs. Thus disclosed is a method of producing a plant expressing reduced levels of a desired gene (such as CBGA synthesis polypeptide) or other desired gene(s), the method comprising (a) providing a plant expressing a desired gene (e.g., a CBGA synthesis polypeptide); and (b) reducing expression of the desired gene in the plant using virus induced gene silencing.

[0195] In some cases, one or more genes can be disrupted. In some cases, the one or more genes can be from the pathway that controls beta oxidation of long chain fatty acids. For example, in some cases, the one or more genes that can be disrupted can be any one of FOX1, FAA1, FAA4, FAT1, PXA1, PXA2, and/or PEX11. Any of the methods described throughout, can be used to disrupt one or more of the genes.

[0196] In some cases, the one or more genes that can be disrupted can comprise FOX1. For example, a sequence that is substantially identical to SEQ ID NO: 39 can be targeted for disruption. Any of the methods described throughout, can be used to disrupt the FOX1 gene, for example, but use of the CRISPR/Cas system or the use of RNAi technology. As few as a single nucleotide needs to be altered to have a disruptive effect to FOX1 or other genes that are targeted for disruption.

### Isolated Polynucleic Acids

[0197] The genes described throughout can be in the form of an isolated polynucleic acid. In other words, the genes can be in forms that do not exist in nature, isolated from a chromosome. The isolated polynucleic acids can comprise a nucleic acid sequence of one or more genes encoding a: (i) acyl activating enzyme (AAE1); (ii) polyketide synthase (PKS); (iii) olivetolic acid cyclase (OAC); (iv) prenyltransferase (PT); (v) THCA synthase (THCAS); (vi) CBDA synthase (CBDAS); and/or (vii) CBCA synthase (CBCAS). For example, the isolated polynucleic acid can comprise a PKS gene. The isolated polynucleic acid can comprise an OAC gene. The isolated polynucleic acid can comprise a PT gene. The isolated polynucleic acid can comprise a THCAS gene. The isolated polynucleic acid can comprise a CBDAS gene. The isolated polynucleic acid can comprise a CBCAS gene. The isolated polynucleic acid can comprise an AAE1 gene.

[0198] In some cases, the isolated polynucleic acid can encode an acyl activating enzyme (AAE1). For example, the isolated polynucleic acid can comprise a nucleotide sequence that is substantially identical to SEQ ID NO: 14. In some cases, the isolated polynucleic acid can comprise a nucleotide sequence that is at least 60%, 65%, 70%, 75%, 80%, 85%, 90%, 91%, 92%, 93%, 94%, 95%, 96%, 97%, 98%, 99%, 99.9%, 99.99%, 99.999%, or 99.9999% identical to SEQ ID NO: 14. In some cases, the isolated polynucleic acid can comprise a nucleotide sequence that is at least 60% identical to SEQ ID NO: 14. In some cases, the isolated polynucleic acid can comprise a nucleotide sequence that is at least 65% identical to SEQ ID NO: 14. In some cases, the isolated polynucleic acid can comprise a nucleotide sequence that is at least 70% identical to SEQ ID NO: 14. In some cases, the isolated polynucleic acid can comprise a nucleotide sequence that is at least 75% identical to SEQ ID NO: 14. In some cases, the isolated polynucleic acid can comprise a nucleotide sequence that is at least 80% identical to SEQ ID NO: 14. In some cases, the isolated polynucleic acid can comprise a nucleotide sequence that is at least 81% identical to SEQ ID NO: 14. In some cases, the isolated polynucleic acid can comprise a nucleotide sequence that is at least 82% identical to SEQ ID NO: 14. In some cases, the isolated polynucleic acid can comprise a nucleotide sequence that is at least 83% identical to SEQ ID NO: 14. In some cases, the isolated polynucleic acid can comprise a nucleotide sequence that is at least 84% identical to SEQ ID NO: 14. In some cases, the isolated polynucleic acid can comprise a nucleotide sequence that is at least 85% identical to SEQ ID NO: 14. In some cases, the isolated polynucleic acid can comprise a nucleotide sequence that is at least 86% identical to SEQ ID NO: 14. In some cases, the isolated polynucleic acid can comprise a nucleotide sequence that is at least 87% identical to SEQ ID NO: 14. In some cases, the isolated polynucleic acid can comprise a nucleotide sequence that is at least 88% identical to SEQ ID NO: 14. In some cases, the isolated polynucleic acid can comprise a nucleotide sequence that is at least 89% identical to SEQ ID NO: 14. In some cases, the isolated polynucleic acid can comprise a nucleotide sequence that is at least 90% identical to SEQ ID NO: 14. In some cases, the isolated polynucleic acid can comprise a nucleotide sequence that is at least 91% identical to SEQ ID NO: 14. In some cases, the isolated polynucleic acid can comprise a nucleotide sequence that is at least 92% identical to SEQ ID NO: 14. In some cases, the isolated polynucleic acid can comprise a nucleotide sequence that is at least 93% identical to SEQ ID NO: 14. In some cases, the isolated polynucleic acid can comprise a nucleotide sequence that is at least 94% identical to SEQ ID NO: 14. In some cases, the isolated polynucleic acid can comprise a nucleotide sequence that is at least 95% identical to SEQ ID NO: 14. In some cases, the isolated polynucleic acid can comprise a nucleotide sequence that is at least 96% identical to SEQ ID NO: 14. In some cases, the isolated polynucleic acid can comprise a nucleotide sequence that is at least 97% identical to SEQ ID NO: 14. In some cases, the isolated polynucleic acid can comprise a nucleotide sequence that is at least 98% identical to SEQ ID NO: 14. In some cases, the isolated polynucleic acid can comprise a nucleotide sequence that is at least 99% identical to SEQ ID NO: 14. In some cases, the isolated polynucleic acid can comprise a nucleotide sequence that is identical to SEQ ID NO: 14.

[0199] In some cases, the isolated polynucleic acid can encode a polyketide synthase (PKS). For example, the isolated polynucleic acid can comprise a nucleotide sequence that is substantially identical to SEQ ID NO: 6. In some cases, the isolated polynucleic acid can comprise a nucleotide sequence that is at least 60%, 65%, 70%, 75%, 80%, 85%, 90%, 91%, 92%, 93%, 94%, 95%, 96%, 97%, 98%, 99%, 99.9%, 99.99%, 99.999%, or 99.9999% identical to SEQ ID NO: 6. In some cases, the isolated polynucleic acid can comprise a nucleotide sequence that is at least 60% identical to SEQ ID NO: 6. In some cases, the isolated polynucleic acid can comprise a nucleotide sequence that is at least 65% identical to SEQ ID NO: 6. In some cases, the isolated polynucleic acid can comprise a nucleotide sequence that is at least 70% identical to SEQ ID NO: 6. In some cases, the isolated polynucleic acid can comprise a nucleotide sequence that is at least 75% identical to SEQ ID NO: 6. In some cases, the isolated polynucleic acid can comprise a nucleotide sequence that is at least 80% identical to SEQ ID NO: 6. In some cases, the isolated polynucleic acid can comprise a nucleotide sequence that is at least 81% identical to SEQ ID NO: 6. In some cases, the isolated polynucleic acid can comprise a nucleotide sequence that is at least 82% identical to SEQ ID NO: 6. In some cases, the isolated polynucleic acid can comprise a nucleotide sequence that is at least 83% identical to SEQ ID NO: 6. In some cases, the isolated polynucleic acid can comprise a nucleotide sequence that is at least 84% identical to SEQ ID NO: 6. In some cases, the isolated polynucleic acid can comprise a nucleotide sequence that is at least 85% identical to SEQ ID NO: 6. In some cases, the isolated polynucleic acid can comprise a nucleotide sequence that is at least 86% identical to SEQ ID NO: 6. In some cases, the isolated polynucleic acid can comprise a nucleotide sequence that is at least 87% identical to SEQ ID NO: 6. In some cases, the isolated polynucleic acid can comprise a nucleotide sequence that is at least 88% identical to SEQ ID NO: 6. In some cases, the isolated polynucleic acid can comprise a nucleotide sequence that is at least 89% identical to SEQ ID NO: 6. In some cases, the isolated polynucleic acid can comprise a nucleotide sequence that is at least 90% identical to SEQ ID NO: 6. In some cases, the isolated polynucleic acid can comprise a nucleotide sequence that is at least 91% identical to SEQ ID NO: 6. In some cases, the isolated polynucleic acid can comprise a nucleotide sequence that is at least 92% identical to SEQ ID NO: 6. In some cases, the isolated polynucleic acid can comprise a nucleotide sequence that is at least 93% identical to SEQ ID NO: 6. In some cases, the isolated polynucleic acid can comprise a nucleotide sequence that is at least 94% identical to SEQ ID NO: 6. In some cases, the isolated polynucleic acid can comprise a nucleotide sequence that is at least 95% identical to SEQ ID NO: 6. In some cases, the isolated polynucleic acid can comprise a nucleotide sequence that is at least 96% identical to SEQ ID NO: 6. In some cases, the isolated polynucleic acid can comprise a nucleotide sequence that is at least 97% identical to SEQ ID NO: 6. In some cases, the isolated polynucleic acid can comprise a nucleotide sequence that is at least 98% identical to SEQ ID NO: 6. In some cases, the isolated polynucleic acid can comprise a nucleotide sequence that is at least 99% identical to SEQ ID NO: 6. In some cases, the isolated polynucleic acid can comprise a nucleotide sequence that is identical to SEQ ID NO: 6.

[0200] In some cases, the isolated polynucleic acid can encode an olivetolic acid cyclase (OAC). For example, the isolated polynucleic acid can comprise a nucleotide sequence that is substantially identical to SEQ ID NO: 8. In some cases, the isolated polynucleic acid can comprise a nucleotide sequence that is at least 60%, 65%, 70%, 75%, 80%, 85%, 90%, 91%, 92%, 93%, 94%, 95%, 96%, 97%, 98%, 99%, 99.9%, 99.99%, 99.999%, or 99.9999% identical to SEQ ID NO: 8. In some cases, the isolated polynucleic acid can comprise a nucleotide sequence that is at least 60% identical to SEQ ID NO: 8. In some cases, the isolated polynucleic acid can comprise a nucleotide sequence that is at least 65% identical to SEQ ID NO: 8. In some cases, the isolated polynucleic acid can comprise a nucleotide sequence that is at least 70% identical to SEQ ID NO: 8. In some cases, the isolated polynucleic acid can comprise a nucleotide sequence that is at least 75% identical to SEQ ID NO: 8. In some cases, the isolated polynucleic acid can comprise a nucleotide sequence that is at least 80% identical to SEQ ID NO: 8. In some cases, the isolated polynucleic acid can comprise a nucleotide sequence that is at least 81% identical to SEQ ID NO: 8. In some cases, the isolated polynucleic acid can comprise a nucleotide sequence that is at least 82% identical to SEQ ID NO: 8. In some cases, the isolated polynucleic acid can comprise a nucleotide sequence that is at least 83% identical to SEQ ID NO: 8. In some cases, the isolated polynucleic acid can comprise a nucleotide sequence that is at least 84% identical to SEQ ID NO: 8. In some cases, the isolated polynucleic acid can comprise a nucleotide sequence that is at least 85% identical to SEQ ID NO: 8. In some cases, the isolated polynucleic acid can comprise a nucleotide sequence that is at least 86% identical to SEQ ID NO: 8. In some cases, the isolated polynucleic acid can comprise a nucleotide sequence that is at least 87% identical to SEQ ID NO: 8. In some cases, the isolated polynucleic acid can comprise a nucleotide sequence that is at least 88% identical to SEQ ID NO: 8. In some cases, the isolated polynucleic acid can comprise a nucleotide sequence that is at least 89% identical to SEQ ID NO: 8. In some cases, the isolated polynucleic acid can comprise a nucleotide sequence that is at least 90% identical to SEQ ID NO: 8. In some cases, the isolated polynucleic acid can comprise a nucleotide sequence that is at least 91% identical to SEQ ID NO: 8. In some cases, the isolated polynucleic acid can comprise a nucleotide sequence that is at least 92% identical to SEQ ID NO: 8. In some cases, the isolated polynucleic acid can comprise a nucleotide sequence that is at least 93% identical to SEQ ID NO: 8. In some cases, the isolated polynucleic acid can comprise a nucleotide sequence that is at least 94% identical to SEQ ID NO: 8. In some cases, the isolated polynucleic acid can comprise a nucleotide sequence that is at least 95% identical to SEQ ID NO: 8. In some cases, the isolated polynucleic acid can comprise a nucleotide sequence that is at least 96% identical to SEQ ID NO: 8. In some cases, the isolated polynucleic acid can comprise a nucleotide sequence that is at least 97% identical to SEQ ID NO: 8. In some cases, the isolated polynucleic acid can comprise a nucleotide sequence that is at least 98% identical to SEQ ID NO: 8. In some cases, the isolated polynucleic acid can comprise a nucleotide sequence that is at least 99% identical to SEQ ID NO: 8. In some cases, the isolated polynucleic acid can comprise a nucleotide sequence that is identical to SEQ ID NO: 8.

[0201] In some cases, the isolated polynucleic acid can encode a prenyltransferase (PT). For example, the isolated polynucleic acid can comprise a nucleotide sequence that is substantially identical to any one of SEQ ID NOs: 2, 26, 31, or 37. In some cases, the isolated polynucleic acid can comprise a nucleotide sequence that is at least 60%, 65%, 70%, 75%, 80%, 85%, 90%, 91%, 92%, 93%, 94%, 95%, 96%, 97%, 98%, 99%, 99.9%, 99.99%, 99.999%, or 99.9999% identical to any one of SEQ ID NOs: 2, 26, 31, or 37. In some cases, the isolated polynucleic acid can comprise a nucleotide sequence that is at least 60% identical to any one of SEQ ID NOs: 2, 26, 31, or 37. In some cases, the isolated polynucleic acid can comprise a nucleotide sequence that is at least 65% identical to any one of SEQ ID NOs: 2, 26, 31, or 37. In some cases, the isolated polynucleic acid can comprise a nucleotide sequence that is at least 70% identical to any one of SEQ ID NOs: 2, 26, 31, or 37. In some cases, the isolated polynucleic acid can comprise a nucleotide sequence that is at least 75% identical to any one of SEQ ID NOs: 2, 26, 31, or 37. In some cases, the isolated polynucleic acid can comprise a nucleotide sequence that is at least 80% identical to any one of SEQ ID NOs: 2, 26, 31, or 37. In some cases, the isolated polynucleic acid can comprise a nucleotide sequence that is at least 81% identical to any one of SEQ ID NOs: 2, 26, 31, or 37. In some cases, the isolated polynucleic acid can comprise a nucleotide sequence that is at least 82% identical to any one of SEQ ID NOs: 2, 26, 31, or 37. In some cases, the isolated polynucleic acid can comprise a nucleotide sequence that is at least 83% identical to any one of SEQ ID NOs: 2, 26, 31, or 37. In some cases, the isolated polynucleic acid can comprise a nucleotide sequence that is at least 84% identical to any one of SEQ ID NOs: 2, 26, 31, or 37. In some cases, the isolated polynucleic acid can comprise a nucleotide sequence that is at least 85% identical to any one of SEQ ID NOs: 2, 26, 31, or 37. In some cases, the isolated polynucleic acid can comprise a nucleotide sequence that is at least 86% identical to any one of SEQ ID NOs: 2, 26, 31, or 37. In some cases, the isolated polynucleic acid can comprise a nucleotide sequence that is at least 87% identical to any one of SEQ ID NOs: 2, 26, 31, or 37. In some cases, the isolated polynucleic acid can comprise a nucleotide sequence that is at least 88% identical to any one of SEQ ID NOs: 2, 26, 31, or 37. In some cases, the isolated polynucleic acid can comprise a nucleotide sequence that is at least 89% identical to any one of SEQ ID NOs: 2, 26, 31, or 37. In some cases, the isolated polynucleic acid can comprise a nucleotide sequence that is at least 90% identical to any one of SEQ ID NOs: 2, 26, 31, or 37. In some cases, the isolated polynucleic acid can comprise a nucleotide sequence that is at least 91% identical to any one of SEQ ID NOs: 2, 26, 31, or 37. In some cases, the isolated polynucleic acid can comprise a nucleotide sequence that is at least 92% identical to any one of SEQ ID NOs: 2, 26, 31, or 37. In some cases, the isolated polynucleic acid can comprise a nucleotide sequence that is at least 93% identical to any one of SEQ ID NOs: 2, 26, 31, or 37. In some cases, the isolated polynucleic acid can comprise a nucleotide sequence that is at least 94% identical to any one of SEQ ID NOs: 2, 26, 31, or 37. In some cases, the isolated polynucleic acid can comprise a nucleotide sequence that is at least 95% identical to any one of SEQ ID NOs: 2, 26, 31, or 37. In some cases, the isolated polynucleic acid can comprise a nucleotide sequence that is at least 96% identical to any one of SEQ ID NOs: 2, 26, 31, or 37. In some cases, the isolated polynucleic acid can comprise a nucleotide sequence that is at least 97% identical to any one of SEQ ID NOs: 2, 26, 31, or 37. In some cases, the isolated polynucleic acid can comprise a nucleotide sequence that is at least 98% identical to any one of SEQ ID NOs: 2, 26, 31, or 37. In some cases, the isolated polynucleic acid can comprise a nucleotide sequence that is at least 99% identical to any one of SEQ ID NOs: 2, 26, 31, or 37. In some cases, the isolated polynucleic acid can comprise a nucleotide sequence that is identical to any one of SEQ ID NOs: 2, 26, 31, or 37.

[0202] In some cases, the isolated polynucleic acid can encode a THCA synthase (THCAS). For example, the isolated polynucleic acid can comprise a nucleotide sequence that is substantially identical to SEQ ID NO: 10. In some cases, the isolated polynucleic acid can comprise a nucleotide sequence that is at least 60%, 65%, 70%, 75%, 80%, 85%, 90%, 91%, 92%, 93%, 94%, 95%, 96%, 97%, 98%, 99%, 99.9%, 99.99%, 99.999%, or 99.9999% identical to SEQ ID NO: 10. In some cases, the isolated polynucleic acid can comprise a nucleotide sequence that is at least 60% identical to SEQ ID NO: 10. In some cases, the isolated polynucleic acid can comprise a nucleotide sequence that is at least 65% identical to SEQ ID NO: 10. In some cases, the isolated polynucleic acid can comprise a nucleotide sequence that is at least 70% identical to SEQ ID NO: 10. In some cases, the isolated polynucleic acid can comprise a nucleotide sequence that is at least 75% identical to SEQ ID NO: 10. In some cases, the isolated polynucleic acid can comprise a nucleotide sequence that is at least 80% identical to SEQ ID NO: 10. In some cases, the isolated polynucleic acid can comprise a nucleotide sequence that is at least 81% identical to SEQ ID NO: 10. In some cases, the isolated polynucleic acid can comprise a nucleotide sequence that is at least 82% identical to SEQ ID NO: 10. In some cases, the isolated polynucleic acid can comprise a nucleotide sequence that is at least 83% identical to SEQ ID NO: 10. In some cases, the isolated polynucleic acid can comprise a nucleotide sequence that is at least 84% identical to SEQ ID NO: 10. In some cases, the isolated polynucleic acid can comprise a nucleotide sequence that is at least 85% identical to SEQ ID NO: 10. In some cases, the isolated polynucleic acid can comprise a nucleotide sequence that is at least 86% identical to SEQ ID NO: 10. In some cases, the isolated polynucleic acid can comprise a nucleotide sequence that is at least 87% identical to SEQ ID NO: 10. In some cases, the isolated polynucleic acid can comprise a nucleotide sequence that is at least 88% identical to SEQ ID NO: 10. In some cases, the isolated polynucleic acid can comprise a nucleotide sequence that is at least 89% identical to SEQ ID NO: 10. In some cases, the isolated polynucleic acid can comprise a nucleotide sequence that is at least 90% identical to SEQ ID NO: 10. In some cases, the isolated polynucleic acid can comprise a nucleotide sequence that is at least 91% identical to SEQ ID NO: 10. In some cases, the isolated polynucleic acid can comprise a nucleotide sequence that is at least 92% identical to SEQ ID NO: 10. In some cases, the isolated polynucleic acid can comprise a nucleotide sequence that is at least 93% identical to SEQ ID NO: 10. In some cases, the isolated polynucleic acid can comprise a nucleotide sequence that is at least 94% identical to SEQ ID NO: 10. In some cases, the isolated polynucleic acid can comprise a nucleotide sequence that is at least 95% identical to SEQ ID NO: 10. In some cases, the isolated polynucleic acid can comprise a nucleotide sequence that is at least 96% identical to SEQ ID NO: 10. In some cases, the isolated polynucleic acid can comprise a nucleotide sequence that is at least 97% identical to SEQ ID NO: 10. In some cases, the isolated polynucleic acid can comprise a nucleotide sequence that is at least 98% identical to SEQ ID NO: 10. In some cases, the isolated polynucleic acid can comprise a nucleotide sequence that is at least 99% identical to SEQ ID NO: 10. In some cases, the isolated polynucleic acid can comprise a nucleotide sequence that is identical to SEQ ID NO: 10.

[0203] In some cases, the isolated polynucleic acid can encode a CBDA synthase (CBDAS). For example, the isolated polynucleic acid can comprise a nucleotide sequence that is substantially identical to SEQ ID NO: 12. In some cases, the isolated polynucleic acid can comprise a nucleotide sequence that is at least 60%, 65%, 70%, 75%, 80%, 85%, 90%, 91%, 92%, 93%, 94%, 95%, 96%, 97%, 98%, 99%, 99.9%, 99.99%, 99.999%, or 99.9999% identical to SEQ ID NO: 12. In some cases, the isolated polynucleic acid can comprise a nucleotide sequence that is at least 60% identical to SEQ ID NO: 12. In some cases, the isolated polynucleic acid can comprise a nucleotide sequence that is at least 65% identical to SEQ ID NO: 12. In some cases, the isolated polynucleic acid can comprise a nucleotide sequence that is at least 70% identical to SEQ ID NO: 12. In some cases, the isolated polynucleic acid can comprise a nucleotide sequence that is at least 75% identical to SEQ ID NO: 12. In some cases, the isolated polynucleic acid can comprise a nucleotide sequence that is at least 80% identical to SEQ ID NO: 12. In some cases, the isolated polynucleic acid can comprise a nucleotide sequence that is at least 81% identical to SEQ ID NO: 12. In some cases, the isolated polynucleic acid can comprise a nucleotide sequence that is at least 82% identical to SEQ ID NO: 12. In some cases, the isolated polynucleic acid can comprise a nucleotide sequence that is at least 83% identical to SEQ ID NO: 12. In some cases, the isolated polynucleic acid can comprise a nucleotide sequence that is at least 84% identical to SEQ ID NO: 12. In some cases, the isolated polynucleic acid can comprise a nucleotide sequence that is at least 85% identical to SEQ ID NO: 12. In some cases, the isolated polynucleic acid can comprise a nucleotide sequence that is at least 86% identical to SEQ ID NO: 12. In some cases, the isolated polynucleic acid can comprise a nucleotide sequence that is at least 87% identical to SEQ ID NO: 12. In some cases, the isolated polynucleic acid can comprise a nucleotide sequence that is at least 88% identical to SEQ ID NO: 12. In some cases, the isolated polynucleic acid can comprise a nucleotide sequence that is at least 89% identical to SEQ ID NO: 12. In some cases, the isolated polynucleic acid can comprise a nucleotide sequence that is at least 90% identical to SEQ ID NO: 12. In some cases, the isolated polynucleic acid can comprise a nucleotide sequence that is at least 91% identical to SEQ ID NO: 12. In some cases, the isolated polynucleic acid can comprise a nucleotide sequence that is at least 92% identical to SEQ ID NO: 12. In some cases, the isolated polynucleic acid can comprise a nucleotide sequence that is at least 93% identical to SEQ ID NO: 12. In some cases, the isolated polynucleic acid can comprise a nucleotide sequence that is at least 94% identical to SEQ ID NO: 12. In some cases, the isolated polynucleic acid can comprise a nucleotide sequence that is at least 95% identical to SEQ ID NO: 12. In some cases, the isolated polynucleic acid can comprise a nucleotide sequence that is at least 96% identical to SEQ ID NO: 12. In some cases, the isolated polynucleic acid can comprise a nucleotide sequence that is at least 97% identical to SEQ ID NO: 12. In some cases, the isolated polynucleic acid can comprise a nucleotide sequence that is at least 98% identical to SEQ ID NO: 12. In some cases, the isolated polynucleic acid can comprise a nucleotide sequence that is at least 99% identical to SEQ ID NO: 12. In some cases, the isolated polynucleic acid can comprise a nucleotide sequence that is identical to SEQ ID NO: 12.

[0204] In some cases, the isolated polynucleic acid can encode a CBCA synthase (CBCAS). For example, the isolated polynucleic acid can comprise a nucleotide sequence that is substantially identical to SEQ ID NO: 18. In some cases, the isolated polynucleic acid can comprise a nucleotide sequence that is at least 60%, 65%, 70%, 75%, 80%, 85%, 90%, 91%, 92%, 93%, 94%, 95%, 96%, 97%, 98%, 99%, 99.9%, 99.99%, 99.999%, or 99.9999% identical to SEQ ID NO: 18. In some cases, the isolated polynucleic acid can comprise a nucleotide sequence that is at least 60% identical to SEQ ID NO: 18. In some cases, the isolated polynucleic acid can comprise a nucleotide sequence that is at least 65% identical to SEQ ID NO: 18. In some cases, the isolated polynucleic acid can comprise a nucleotide sequence that is at least 70% identical to SEQ ID NO: 18. In some cases, the isolated polynucleic acid can comprise a nucleotide sequence that is at least 75% identical to SEQ ID NO: 18. In some cases, the isolated polynucleic acid can comprise a nucleotide sequence that is at least 80% identical to SEQ ID NO: 18. In some cases, the isolated polynucleic acid can comprise a nucleotide sequence that is at least 81% identical to SEQ ID NO: 18. In some cases, the isolated polynucleic acid can comprise a nucleotide sequence that is at least 82% identical to SEQ ID NO: 18. In some cases, the isolated polynucleic acid can comprise a nucleotide sequence that is at least 83% identical to SEQ ID NO: 18. In some cases, the isolated polynucleic acid can comprise a nucleotide sequence that is at least 84% identical to SEQ ID NO: 18. In some cases, the isolated polynucleic acid can comprise a nucleotide sequence that is at least 85% identical to SEQ ID NO: 18. In some cases, the isolated polynucleic acid can comprise a nucleotide sequence that is at least 86% identical to SEQ ID NO: 18. In some cases, the isolated polynucleic acid can comprise a nucleotide sequence that is at least 87% identical to SEQ ID NO: 18. In some cases, the isolated polynucleic acid can comprise a nucleotide sequence that is at least 88% identical to SEQ ID NO: 18. In some cases, the isolated polynucleic acid can comprise a nucleotide sequence that is at least 89% identical to SEQ ID NO: 18. In some cases, the isolated polynucleic acid can comprise a nucleotide sequence that is at least 90% identical to SEQ ID NO: 18. In some cases, the isolated polynucleic acid can comprise a nucleotide sequence that is at least 91% identical to SEQ ID NO: 18. In some cases, the isolated polynucleic acid can comprise a nucleotide sequence that is at least 92% identical to SEQ ID NO: 18. In some cases, the isolated polynucleic acid can comprise a nucleotide sequence that is at least 93% identical to SEQ ID NO: 18. In some cases, the isolated polynucleic acid can comprise a nucleotide sequence that is at least 94% identical to SEQ ID NO: 18. In some cases, the isolated polynucleic acid can comprise a nucleotide sequence that is at least 95% identical to SEQ ID NO: 18. In some cases, the isolated polynucleic acid can comprise a nucleotide sequence that is at least 96% identical to SEQ ID NO: 18. In some cases, the isolated polynucleic acid can comprise a nucleotide sequence that is at least 97% identical to SEQ ID NO: 18. In some cases, the isolated polynucleic acid can comprise a nucleotide sequence that is at least 98% identical to SEQ ID NO: 18. In some cases, the isolated polynucleic acid can comprise a nucleotide sequence that is at least 99% identical to SEQ ID NO: 18. In some cases, the isolated polynucleic acid can comprise a nucleotide sequence that is identical to SEQ ID NO: 18.

[0205] In some cases, the isolated polynucleic acid can encode a HMG-CoA reductase (HMG1). For example, the isolated polynucleic acid can comprise a nucleotide sequence that is substantially identical to SEQ ID NO: 20 or 22. In some cases, the isolated polynucleic acid can comprise a nucleotide sequence that is at least 50%, 60%, 70%, 80%, 85%, 90%, 95%, 96%, 97%, 98% or 99% identical to SEQ ID NO: 20 or 22. In some cases, the isolated polynucleic acid can comprise a nucleotide sequence that is at least 50% identical to SEQ ID NO: 20 or 22. In some cases, the isolated polynucleic acid can comprise a nucleotide sequence that is at least 60% identical to SEQ ID NO: 20 or 22. In some cases, the isolated polynucleic acid can comprise a nucleotide sequence that is at least 65% identical to SEQ ID NO: 20 or 22. In some cases, the isolated polynucleic acid can comprise a nucleotide sequence that is at least 70% identical to SEQ ID NO: 20 or 22. In some cases, the isolated polynucleic acid can comprise a nucleotide sequence that is at least 75% identical to SEQ ID NO: 20 or 22. In some cases, the isolated polynucleic acid can comprise a nucleotide sequence that is at least 80% identical to SEQ ID NO: 20 or 22. In some cases, the isolated polynucleic acid can comprise a nucleotide sequence that is at least 81% identical to SEQ ID NO: 20 or 22. In some cases, the isolated polynucleic acid can comprise a nucleotide sequence that is at least 82% identical to SEQ ID NO: 20 or 22. In some cases, the isolated polynucleic acid can comprise a nucleotide sequence that is at least 83% identical to SEQ ID NO: 20 or 22. In some cases, the isolated polynucleic acid can comprise a nucleotide sequence that is at least 84% identical to SEQ ID NO: 20 or 22. In some cases, the isolated polynucleic acid can comprise a nucleotide sequence that is at least 85% identical to SEQ ID NO: 20 or 22. In some cases, the isolated polynucleic acid can comprise a nucleotide sequence that is at least 86% identical to SEQ ID NO: 20 or 22. In some cases, the isolated polynucleic acid can comprise a nucleotide sequence that is at least 87% identical to SEQ ID NO: 20 or 22. In some cases, the isolated polynucleic acid can comprise a nucleotide sequence that is at least 88% identical to SEQ ID NO: 20 or 22. In some cases, the isolated polynucleic acid can comprise a nucleotide sequence that is at least 89% identical to SEQ ID NO: 20 or 22. In some cases, the isolated polynucleic acid can comprise a nucleotide sequence that is at least 90% identical to SEQ ID NO: 20 or 22. In some cases, the isolated polynucleic acid can comprise a nucleotide sequence that is at least 91% identical to SEQ ID NO: 20 or 22. In some cases, the isolated polynucleic acid can comprise a nucleotide sequence that is at least 92% identical to SEQ ID NO: 20 or 22. In some cases, the isolated polynucleic acid can comprise a nucleotide sequence that is at least 93% identical to SEQ ID NO: 20 or 22. In some cases, the isolated polynucleic acid can comprise a nucleotide sequence that is at least 94% identical to SEQ ID NO: 20 or 22. In some cases, the isolated polynucleic acid can comprise a nucleotide sequence that is at least 95% identical to SEQ ID NO: 20 or 22. In some cases, the isolated polynucleic acid can comprise a nucleotide sequence that is at least 96% identical to SEQ ID NO: 20 or 22. In some cases, the isolated polynucleic acid can comprise a nucleotide sequence that is at least 97% identical to SEQ ID NO: 20 or 22. In some cases, the isolated polynucleic acid can comprise a nucleotide sequence that is at least 98% identical to SEQ ID NO: 20 or 22. In some cases, the isolated polynucleic acid can comprise a nucleotide sequence that is at least 99% identical to SEQ ID NO: 20 or 22. In some cases, the isolated polynucleic acid can comprise a nucleotide sequence that is identical to SEQ ID NO: 20 or 22.

[0206] In some cases, the isolated polynucleic acid can encode a farnesyl pyrophosphate synthetase (ERG20). For example, the isolated polynucleic acid can comprise a nucleotide sequence that is substantially identical to SEQ ID NO: 24. In some cases, the isolated polynucleic acid can comprise a nucleotide sequence that is at least 50%, 60%, 70%, 80%, 85%, 90%, 95%, 96%, 97%, 98% or 99% identical to SEQ ID NO: 24. In some cases, the isolated polynucleic acid can comprise a nucleotide sequence that is at least 50% identical to SEQ ID NO: 24. In some cases, the isolated polynucleic acid can comprise a nucleotide sequence that is at least 60% identical to SEQ ID NO: 24. In some cases, the isolated polynucleic acid can comprise a nucleotide sequence that is at least 65% identical to SEQ ID NO: 24. In some cases, the isolated polynucleic acid can comprise a nucleotide sequence that is at least 70% identical to SEQ ID NO: 24. In some cases, the isolated polynucleic acid can comprise a nucleotide sequence that is at least 75% identical to SEQ ID NO: 24. In some cases, the isolated polynucleic acid can comprise a nucleotide sequence that is at least 80% identical to SEQ ID NO: 24. In some cases, the isolated polynucleic acid can comprise a nucleotide sequence that is at least 81% identical to SEQ ID NO: 24. In some cases, the isolated polynucleic acid can comprise a nucleotide sequence that is at least 82% identical to SEQ ID NO: 24. In some cases, the isolated polynucleic acid can comprise a nucleotide sequence that is at least 83% identical to SEQ ID NO: 24. In some cases, the isolated polynucleic acid can comprise a nucleotide sequence that is at least 84% identical to SEQ ID NO: 24. In some cases, the isolated polynucleic acid can comprise a nucleotide sequence that is at least 85% identical to SEQ ID NO: 24. In some cases, the isolated polynucleic acid can comprise a nucleotide sequence that is at least 86% identical to SEQ ID NO: 24. In some cases, the isolated polynucleic acid can comprise a nucleotide sequence that is at least 87% identical to SEQ ID NO: 24. In some cases, the isolated polynucleic acid can comprise a nucleotide sequence that is at least 88% identical to SEQ ID NO: 24. In some cases, the isolated polynucleic acid can comprise a nucleotide sequence that is at least 89% identical to SEQ ID NO: 24. In some cases, the isolated polynucleic acid can comprise a nucleotide sequence that is at least 90% identical to SEQ ID NO: 24. In some cases, the isolated polynucleic acid can comprise a nucleotide sequence that is at least 91% identical to SEQ ID NO: 24. In some cases, the isolated polynucleic acid can comprise a nucleotide sequence that is at least 92% identical to SEQ ID NO: 24. In some cases, the isolated polynucleic acid can comprise a nucleotide sequence that is at least 93% identical to SEQ ID NO: 24. In some cases, the isolated polynucleic acid can comprise a nucleotide sequence that is at least 94% identical to SEQ ID NO: 24. In some cases, the isolated polynucleic acid can comprise a nucleotide sequence that is at least 95% identical to SEQ ID NO: 24. In some cases, the isolated polynucleic acid can comprise a nucleotide sequence that is at least 96% identical to SEQ ID NO: 24. In some cases, the isolated polynucleic acid can comprise a nucleotide sequence that is at least 97% identical to SEQ ID NO: 24. In some cases, the isolated polynucleic acid can comprise a nucleotide sequence that is at least 98% identical to SEQ ID NO: 24. In some cases, the isolated polynucleic acid can comprise a nucleotide sequence that is at least 99% identical to SEQ ID NO: 24. In some cases, the isolated polynucleic acid can be identical to SEQ ID NO: 24.

### Methods of Making Genetically Modified Microorganisms

[0207] Disclosed herein is a method of making a genetically modified microorganism capable of converting a carbon substrate into CBGA. Also disclosed herein is a method of making a genetically modified microorganism capable of converting a carbon substrate into a cannabinoid.

[0208] In some cases, the microorganism can be made by contacting the microorganism with one or more polynucleotides. The polynucleotides can be a vector. The polynucleotides can also comprise one or more genes encoding for an enzymes.

[0209] In some cases, the microorganism can be grown so that the polynucleotides are inserted into the microorganism. In some cases, the insertion can be done any method, e.g., transfections, transformation, etc. The insertion of the microorganism can be by plasmid or in some cases the insertion can lead to a stable integration of the plasmid into the chromosome of the microorganism.

[0210] The genes encoding for an enzymes can include (i) acyl activating enzyme (AAE1); (ii) polyketide synthase (PKS); (iii) olivetolic acid cyclase (OAC); (iv) prenyltransferase (PT); (v) THCA synthase (THCAS); (vi) CBDA synthase (CBDAS); and/or (vii) CBCA synthase (CBCAS). In some further cases, the genes encoding for an enzyme can include (viii) a HMG-Co reductase (HMG1) and/or (ix) a farnesyl pyrophosphate synthetase (ERG20).

[0211] In some cases, the microorganism can be contacted with a polynucleotide that encodes for a prenyltransferase (PT). In some cases, the PT can be encoded by a nucleotide sequence that is substantially identical to SEQ ID NO: 2. In some cases, the polynucleotide can be translated into an amino acid sequence that is substantially identical to SEQ ID NO: 1. In some cases, the PT can be encoded by a nucleotide sequence that is substantially identical to SEQ ID NO: 26. In some cases, the polynucleotide can be translated into an amino acid sequence that is substantially identical to SEQ ID NO: 27. In some cases, the PT can be encoded by a nucleotide sequence that is substantially identical to SEQ ID NO: 31. In some cases, the polynucleotide can be translated into an amino acid sequence that is substantially identical to SEQ ID NO: 32. In some cases, the PT can be encoded by a nucleotide sequence that is substantially identical to SEQ ID NO: 37. In some cases, the polynucleotide can be translated into an amino acid sequence that is substantially identical to SEQ ID NO: 38.

[0212] In some cases, the microorganism can also be contacted with a polynucleotide that encodes for an AAE1. In some cases, the AAE1 is encoded by a polynucleotide sequence that is substantially identical to SEQ ID NO: 14. In some cases, the polynucleotide can be translated into an amino acid sequence that is substantially identical to SEQ ID NO: 13.

[0213] In some cases, the microorganism can also be contacted with a polynucleotide that encodes for a PKS. In some cases, the PKS encoded by a polynucleotide sequence that is substantially identical to SEQ ID NO: 6. In some cases, the polynucleotide can be translated into an amino acid sequence that is substantially identical to SEQ ID NO: 5.

[0214] In some cases, the microorganism can also be contacted with a polynucleotide that encodes for an OAC. In some cases, the OAC encoded by a polynucleotide sequence that is substantially identical to SEQ ID NO: 8. In some cases, the polynucleotide can be translated into an amino acid sequence that is substantially identical to SEQ ID NO: 7.

[0215] In some cases, the microorganism can also be contacted with a polynucleotide that encodes for a THCAS. In some cases, the THCAS encoded by a polynucleotide sequence that is substantially identical to SEQ ID NO: 10. In some cases, the polynucleotide can be translated into an amino acid sequence that is substantially identical to SEQ ID NO: 9.

[0216] In some cases, the microorganism can also be contacted with a polynucleotide that encodes for a CBDAS. In some cases, the CBDAS encoded by a polynucleotide sequence that is substantially identical to SEQ ID NO: 12. In some cases, the polynucleotide can be translated into an amino acid sequence that is substantially identical to SEQ ID NO: 11.

[0217] In some cases, the microorganism can also be contacted with a polynucleotide that encodes for a CBCAS. In some cases, the CBCAS encoded by a polynucleotide sequence that is substantially identical to SEQ ID NO: 18. In some cases, the polynucleotide can be translated into an amino acid sequence that is substantially identical to SEQ ID NO: 17.

[0218] In some cases, the microorganism can also be contacted with a polynucleotide that encodes for an HMG-Co reductase (HMG1). In some cases, the HMG1 encoded by a polynucleotide sequence that is substantially identical to SEQ ID NO: 20 or 22. In some cases, the polynucleotide can be translated into an amino acid sequence that is substantially identical to SEQ ID NO: 19 or 21.

[0219] In some cases, the microorganism can also be contacted with a polynucleotide that encodes for a farnesyl pyrophosphate synthetase (ERG20). In some cases, the ERG20 encoded by a polynucleotide sequence that is substantially identical to SEQ ID NO: 24. In some cases, the polynucleotide can be translated into an amino acid sequence that is substantially identical to SEQ ID NO: 23.

[0220] The microorganism can be any type of microorganism that is disclosed throughout. For example, the microorganism can be a bacterium or a yeast.

[0221] The cannabinoid that can be made can be one or more of the following: cannabinoid is Δ⁹-tetrahydrocannabinolic acid (THCA), cannabidiolic acid (CBDA), cannabichromenic acid (CBCA), Δ⁹-tetrahydrocannabinol (THC), cannabidiol (CBD), cannabichromene (CBC), Δ⁹-tetrahydrocannabivarinic acid (THCVA), cannabidivarinic acid (CBDVA), cannabichromevarinic acid (CBCVA), or any combination thereof.

### Exemplary Genetically Modified Microorganisms

[0222] Disclosed herein is a genetically modified microorganism capable of converting a carbon substrate into CBGA, CBGVA or a cannabinoid.

[0223] The genetically modified microorganism can comprise a heterologous polynucleotide encoding an acyl activating enzyme (AAE1); polyketide synthase (PKS); olivetolic acid cyclase (OAC); and/or prenyltransferase (PT). In some cases, two or more polynucleotides encoding AAE1, PKS, OAC, and/or PT can be present within the genetically modified microorganism. In some cases, three of the polynucleotides encoding AAE1, PKS, OAC, and/or PT can be present within the genetically modified microorganism. In some cases, all four of the polynucleotides encoding AAE1, PKS, OAC, and PT can be present within the genetically modified microorganism.

[0224] Additionally, the genetically modified microorganism can further comprise polynucleotides encoding for a THCA synthase (THCAS); a CBDA synthase (CBDAS), a CBCA synthase (CBCAS), an HMG-Co reductase (HMG1) and/or a farnesyl pyrophosphate synthetase (ERG20). In some cases, the polynucleotides can be heterologous. In some cases, two or more polynucleotides encoding THCAS, CBDAS, CBCAS, HMG1, and/or ERG20 can be present within the genetically modified microorganism. In some cases, three or more of the polynucleotides encoding THCAS, CBDAS, CBCAS, HMG1, and/or ERG20 can be present within the genetically modified microorganism.

[0225] Should an AAE1 be present within the genetically modified microorganism, the AAE1 can be encoded by an amino acid sequence that is substantially identical to SEQ ID NO: 13. In some cases, the AAE1 can be encoded by a polynucleotide sequence that is substantially identical to SEQ ID NO: 14.

[0226] Should a PKS be present within the genetically modified microorganism, the PKS can be encoded by an amino acid sequence that is substantially identical to SEQ ID NO: 5. In some cases, the PKS can be encoded by a polynucleotide sequence that is substantially identical to SEQ ID NO: 6.

[0227] Should an OAC be present within the genetically modified microorganism, the OAC can be encoded by an amino acid sequence that is substantially identical to SEQ ID NO: 7. In some cases, the OAC can be encoded by a polynucleotide sequence that is substantially identical to SEQ ID NO: 8.

[0228] Should a PT be present within the genetically modified microorganism, the PT can be encoded by an amino acid sequence that is substantially identical to any one of SEQ ID NOs: 1, 27, 32, or 38. In some cases, the PT can be encoded by a polynucleotide sequence that is substantially identical to any one of SEQ ID NOs: 2, 26, 31, or 37.

[0229] Should a THCAS be present within the genetically modified microorganism, the THCAS can be encoded by an amino acid sequence that is substantially identical to SEQ ID NO: 9. In some cases, the THCAS can be encoded by a polynucleotide sequence that is substantially identical to SEQ ID NO: 10.

[0230] Should a CBDAS be present within the genetically modified microorganism, the CBDAS can be encoded by an amino acid sequence that is substantially identical to SEQ ID NO: 11. In some cases, the CBDAS can be encoded by a polynucleotide sequence that is substantially identical to SEQ ID NO: 12.

[0231] Should a CBCAS be present within the genetically modified microorganism, the CBCAS can be encoded by an amino acid sequence that is substantially identical to SEQ ID NO: 17. In some cases, the CBCAS can be encoded by a polynucleotide sequence that is substantially identical to SEQ ID NO: 18.

[0232] Should a HMG1 be present within the genetically modified microorganism, the CBCAS can be encoded by an amino acid sequence that is substantially identical to SEQ ID NO: 19 or 21. In some cases, the CBCAS can be encoded by a polynucleotide sequence that is substantially identical to SEQ ID NO: 20 or 22.

[0233] Should an ERG20 be present within the genetically modified microorganism, the ERG20 can be encoded by an amino acid sequence that is substantially identical to SEQ ID NO: 23. In some cases, the ERG20 can be encoded by a polynucleotide sequence that is substantially identical to SEQ ID NO: 24.

[0234] Should a TKS (OS) be present within the genetically modified microorganism, the TKS can be encoded by an amino acid sequence that is substantially identical to SEQ ID NO:41. In some cases, the TKS can be encoded by a polynucleotide sequence that is substantially identical to SEQ ID NO: 40.

[0235] In certain cases, the genetically modified microorganism can be a yeast or bacterium. Should the genetically modified microorganism be a yeast, the yeast can be from the genus Saccharomyces. More specifically, the yeast can be from the species Saccharomyces cerevisiae. Should the genetically modified microorganism be a bacterium, the bacterium can be from the genus Escherichia, e.g., Escherichia coli.

[0236] The genetically modified microorganism can use hexanoic acid and/or butyric acid. In some cases, the genetically modified microorganism can use sugar as a substrate. In some cases, the genetically modified microorganism can make a CBGA, CBGVA, THCA, CBDA, CBCA or a cannabinoid. If a cannabinoid is made, in some cases, the cannabinoid can be 49-tetrahydrocannabinol (THC), cannabidiol (CBD), cannabichromene (CBC), Δ⁹-tetrahydrocannabivarinic acid (THCVA), cannabidivarinic acid (CBDVA), and/or cannabichromevarinic acid (CBCVA).

### Fermentation Methods and Processes

[0237] In general, the microorganisms disclosed herein should be placed in fermentation conditions that are appropriate to convert a carbon source (such as a sugar, alcohol, and/or fatty acid) to CBGA, CBGVA or a cannabinoid (e.g., THC, CBD, CBC, THCVA, CBDVA, CBCVA). Reaction conditions that should be considered include temperature, media flow rate, pH, media redox potential, agitation rate (if using a continuous stirred tank reactor), inoculum level, maximum substrate concentrations and rates of introduction of the substrate to the bioreactor to ensure that substrate level does not become limiting, and maximum product concentrations to avoid product inhibition.

[0238] In some cases, non-genetically modified microorganisms can be used to increase CBGA or cannabinoid production. For example, cells taken from organisms that naturally produce cannabinoids can be used. These cells can be isolated and once isolated they can be used in a fermentation process.

### Fermentation Conditions

[0239] The fermentation conditions described herein are applicable to any and all methods disclosed throughout the application.

[0240] pH can have a profound effect on overall CBGA, CBGVA or cannabinoid production. Therefore, pH adjustments should be made in some cases.

[0241] In some cases, the pH during fermentation can vary from 4 to 10. In some instances, the pH can be from 5 to 9; 6 to 8; 6.1 to 7.9; 6.2 to 7.8; 6.3 to 7.7; 6.4 to 7.6; or 6.5 to 7.5. For example, the pH can be from 6.6 to 7.4. In some instances, the pH can be from 5 to 9. In some instances, the pH can be from 6 to 8. In some instances, the pH can be from 6.1 to 7.9. In some instances, the pH can be from 6.2 to 7.8. In some instances, the pH can be from 6.3 to 7.7. In some instances, the pH can be from 6.4 to 7.6. In some instances, the pH can be from 5.5 to 7.5. In some instances, the pH can be from 6.5 to 7.5. In some instances the pH used for the fermentation can be greater than 6. In some instances the pH used for the fermentation can be lower than 10.

[0242] Temperature

[0243] Temperature can also be adjusted based on cell, microorganism, or enzyme sensitivity. For example, the temperature used during fermentation, can from 27° C. to 45° C. In other instances, the temperature of the fermentation can be from 27° C. to 45° C.; 28° C. to 44° C.; 29° C. to 43° C.; 30° C. to 42° C.; 31° C. to 41° C.; 32° C. to 40° C. For example, the temperature can be from 36° C. to 39° C. (e.g., 36° C., 37° C., 38° C., or 39° C. In some instances, the temperature can be from 27° C. to 45° C. In some instances, the temperature can be from 28° C. to 44° C. In some instances, the temperature can be from 29° C. to 43° C. In some instances, the temperature can be from 30° C. to 42° C. In some instances, the temperature can be from 31° C. to 41° C. In some instances, the temperature can be from 32° C. to 40° C.

[0244] Gases

[0245] Availability of oxygen and other gases such as gaseous CO₂ can affect yield and fermentation rate. For example, when considering oxygen availability, the percent of dissolved oxygen (DO) within the fermentation media can be from 1% to 40%. In certain instances, the DO concentration can be from 1.5% to 35%; 2% to 30%; 2.5% to 25%; 3% to 20%; 4% to 19%; 5% to 18%; 6% to 17%; 7% to 16%; 8% to 15%; 9% to 14%; 10% to 13%; or 11% to 12%. For example, in some cases the DO concentration can be from 2% to 30%. In other cases, the DO can be from 3% to 20%. In some instances, the DO can be from 4% to 10%. In some cases, the DO can be from 1.5% to 35%. In some cases, the DO can be from 2.5% to 25%. In some cases, the DO can be from 4% to 19%. In some cases, the DO can be from 5% to 18%. In some cases, the DO can be from 6% to 17%. In some cases, the DO can be from 7% to 16%. In some cases, the DO can be from 8% to 15%. In some cases, the DO can be from 9% to 14%. In some cases, the DO can be from 10% to 13%. In some cases, the DO can be from 11% to 12%.

[0246] For example, when considering atmospheric CO₂, the percent of atmospheric CO₂ within an incubator can be from 0% to 10%. In some cases, atmospheric CO₂ can help to control the pH within cell culture medium. pH contain within cell culture media is dependent on a balance of dissolved CO₂ and bicarbonate (HCO₃). Changes in atmospheric CO₂ can alter the pH of the medium. In certain instances, the atmospheric CO₂ can be from 0% to 10%; 0.01% to 9%; 0.05% to 8%; 0.1% to 7%; 0.5% to 6%; 1% to 5%; 2% to 4%; 3% to 6%; 4% to 7%; 2% to 6%; or 5% to 10%. For example, in some cases the atmospheric CO₂ can be from 0% to 10%. In other cases, the atmospheric CO₂ can be from 0.01% to 9%. In some instances, the atmospheric CO₂ can be from 0.05% to 8%. In some cases, the atmospheric CO₂ can be from 0.1% to 7%. In some cases, the atmospheric CO₂ can be from 0.5% to 6%. In some cases, the atmospheric CO₂ can be from 1% to 5%. In some cases, the atmospheric CO₂ can be from 2% to 4%. In some cases, the atmospheric CO₂ can be from 3% to 6%. In some cases, the atmospheric CO₂ can be from 4% to 7%. In some cases, the atmospheric CO₂ can be from 2% to 6%. In some cases, the atmospheric CO₂ can be from 5% to 10%.

[0247] Bioreactors

[0248] Fermentation reactions can be carried out in any suitable bioreactor. In some embodiments of the invention, the bioreactor can comprise a first, growth reactor in which the microorganisms or cells are cultured, and a second, fermentation reactor, to which broth from the growth reactor is fed and in which most of the fermentation product (for example, CBGA or cannabinoids) is produced.

[0249] Media

[0250] The medium used to ferment CBGA, CBGVA or cannabinoid with the microorganisms described throughout can include hexanoic acid and/or butyric acid. For example, in some cases, the media can comprise a combination of hexanoic acid, yeast extract, peptone, and glucose. In other cases, the media can comprise a combination of butyric acid, yeast extract, peptone, and glucose. In certain cases, the media can comprise 10 g/L of yeast extract, 20 g/L peptone, 20 g/L glucose and 100 mg/L hexanoic acid or butyric acid. In some cases, hexanoic acid or butyric acid can be used in an amount of 1 mg/L to 1 g/L. In some cases, hexanoic acid or butyric acid can be used in an amount of 10 mg/to 900 mg/L. In some cases, hexanoic acid or butyric acid can be used in an amount of 25 mg/to 800 mg/L. In some cases, hexanoic acid or butyric acid can be used in an amount of 50 mg/to 700 mg/L. In some cases, hexanoic acid or butyric acid can be used in an amount of 75 mg/to 600 mg/L. In some cases, hexanoic acid or butyric acid can be used in an amount of 100 mg/to 500 mg/L. In some cases, hexanoic acid or butyric acid can be used in an amount of 125 mg/to 400 mg/L. In some cases, hexanoic acid or butyric acid can be used in an amount of 150 mg/to 300 mg/L. In some cases, hexanoic acid or butyric acid can be used in an amount of 175 mg/to 250 mg/L. In some cases, hexanoic acid or butyric acid can be used in an amount of 50 mg/to 250 mg/L. In some cases, hexanoic acid or butyric acid can be used in an amount of 75 mg/to 200 mg/L. In some cases, hexanoic acid or butyric acid can be used in an amount of 90 mg/to 150 mg/L. Henanoic and butyric acid can be used in similar concentrations.

[0251] In some cases, hexanoic acid can be used in an amount of 1 g/L to produce 700 mg/L of CBGA or cannabinoids with the microorganism described throughout. In some cases, hexanoic acid can be used in an amount of at least about 1 g/L, at least about 1.5 g/L, at least about 2 g/L, at least about 2.5 g/L, at least about 3 g/L, at least about 3.5 g/L, at least about 4 g/L, at least about 4.5 g/L, at least about 5 g/L, at least about 5.5 g/L, at least about 6 g/L, at least about 6.5 g/L, at least about 7 g/L, at least about 7.5 g/L, at least about 8 g/L, at least about 8.5 g/L, at least about 9 g/L, at least about 9.5 g/L, at least about 10 g/L, at least about 11 g/L, at least about 12 g/L, at least about 13 g/L, at least about 14 g/L, at least about 15 g/L, at least about 16 g/L, at least about 17 g/L, at least about 18 g/L, at least about 19 g/L, at least about 20 g/L, between about 0.1 g/L and about 20 g/L, between about 0.5 g/L and about 15 g/L, between about 1 g/L and about 10 g/L, between about 1 g/L and about 9 g/L, between about 1 g/L and about 8 g/L, between about 1 g/L and about 7 g/L, between about 2 g/L and about 6 g/L, between about 2 g/L and about 5 g/L, or between about 3 g/L and about 4 g/L. In some cases, butyric acid can be used in an amount of 1 g/L to produce 700 mg/L of CBGVA or cannabinoids with the microorganism described throughout. In some cases, butric acid can be used in an amount of at least about 1 g/L, at least about 1.5 g/L, at least about 2 g/L, at least about 2.5 g/L, at least about 3 g/L, at least about 3.5 g/L, at least about 4 g/L, at least about 4.5 g/L, at least about 5 g/L, at least about 5.5 g/L, at least about 6 g/L, at least about 6.5 g/L, at least about 7 g/L, at least about 7.5 g/L, at least about 8 g/L, at least about 8.5 g/L, at least about 9 g/L, at least about 9.5 g/L, at least about 10 g/L, at least about 11 g/L, at least about 12 g/L, at least about 13 g/L, at least about 14 g/L, at least about 15 g/L, at least about 16 g/L, at least about 17 g/L, at least about 18 g/L, at least about 19 g/L, at least about 20 g/L, between about 0.1 g/L and about 20 g/L, between about 0.5 g/L and about 15 g/L, between about 1 g/L and about 10 g/L, between about 1 g/L and about 9 g/L, between about 1 g/L and about 8 g/L, between about 1 g/L and about 7 g/L, between about 2 g/L and about 6 g/L, between about 2 g/L and about 5 g/L, or between about 3 g/L and about 4 g/L. In certain instances, the microorganism described throughout is fermented in a stirred tank fermentor.

[0252] In other cases, olivetolic acid can be used to ferment CBGA or cannabinoids with the microorganism described throughout. For example, in some cases, the media can comprise a combination of olivetolic acid, yeast extract, peptone, and glucose. In certain cases, the media can comprise 10 g/L of yeast extract, 20 g/L peptone, 20 g/L glucose and 40 mg/L hexanoic acid. In some cases, olivetolic acid can be used in an amount of 1 mg/to 1 g/L. In some cases, olivetolic acid can be used in an amount of 5 mg/to 900 mg/L. In some cases, olivetolic acid can be used in an amount of 10 mg/to 800 mg/L. In some cases, olivetolic acid can be used in an amount of 15 mg/to 700 mg/L. In some cases, olivetolic acid can be used in an amount of 20 mg/to 600 mg/L. In some cases, olivetolic acid can be used in an amount of 25 mg/to 500 mg/L. In some cases, olivetolic acid can be used in an amount of 30 mg/to 400 mg/L. In some cases, olivetolic acid can be used in an amount of 35 mg/to 300 mg/L. In some cases, olivetolic acid can be used in an amount of 40 mg/to 200 mg/L. In some cases, olivetolic acid can be used in an amount of 50 mg/to 150 mg/L. In some cases, olivetolic acid can be used in an amount of 10 mg/to 100 mg/L. In some cases, olivetolic acid can be used in an amount of 20 mg/to 75 mg/L. In some cases, olivetolic acid can be used in an amount of 30 mg/to 50 mg/L.

[0253] Product Recovery

[0254] The fermentation of the microorganisms disclosed herein can produce a fermentation broth comprising a desired product (e.g., CBGA, CBGVA, THCA, CBDA or CBCA or cannabinoid) and/or one or more by-products as well as the cells/microorganisms (e.g., a genetically modified microorganism), in a nutrient medium.

[0255] In certain embodiments the CBGA, THCA, CBDA or CBCA produced in the fermentation reaction is converted to a cannabinoid, such as THC, CBD, and/or CDC. This conversion can happen directly from the fermentation broth. However, in other embodiments, the CBGA, THCA, CBDA or CBCA can be first recovered from the fermentation broth before conversion to a cannabinoid such as THC, CBD, and/or CDC. In certain embodiments the CBGVA produced in the fermentation reaction is converted to a cannabinoid, such as THCC, CBDV, and/or CDCV. This conversion can happen directly from the fermentation broth. However, in other embodiments, the CBGVA can be first recovered from the fermentation broth before conversion to a cannabinoid such as THCV, CBDV, and/or CDCV.

[0256] In some cases, the CBGA, CBGVA, THCA, CBDA or CBCA can be continuously removed from a portion of broth and recovered as purified the CBGA. In particular embodiments, the recovery of the CBGA, CBGVA, THCA, CBDA or CBCA includes passing the removed portion of the broth containing the CBGA, CBGVA, THCA, CBDA or CBCA through a separation unit to separate the microorganisms (e.g., genetically modified microorganism) from the broth, to produce a cell-free CBGA, CBGVA, THCA, CBDA or CBCA containing permeate, and returning the microorganisms to the bioreactor. Additional nutrients can be added to the media to replenish its nutrients before it is returned to the bioreactor. The cell-free CBGA, CBGVA, THCA, CBDA or CBCA permeate can then be stored or be used for subsequent conversion to cannabinoids (or other desired product).

[0257] Also, if the pH of the broth was adjusted during recovery of CBGA CBGVA, THCA, CBDA or CBCA the pH should be re-adjusted to a similar pH to that of the broth in the fermentation bioreactor, before being returned to the bioreactor.

[0258] Subsequent purification steps can involve treating the post-fermentation CBGA, CBGVA, THCA, CBDA or CBCA product using methods known in the art to recover individual product species of interest to high purity.

[0259] In one example, CBGA, CBGVA, THCA, CBDA or CBCA extracted in an organic phase can be transferred to an aqueous solution. In some cases, the organic solvent can be evaporated by heat and/or vacuum, and the resulting powder can be dissolved in an aqueous solution of suitable pH. The aqueous phase can then be removed by decantation, centrifugation, or another method. For example, when the organic solvent is ethyl acetate, the resulting powder from evaporation is dissolved in a water:acetonitrile mixture (50:50 ratio).

[0260] The same methods as described above can be applied to cannabinoids, should they be produced.

### CBGA, CBGVA or Cannabinoid Production Levels

[0261] The microorganisms and the methods herein can produce CBGA, CBGVA, THCA, CBDA, CBCA or cannabinoids at surprisingly high efficiency, more so than other known CBGA, CBGVA, THCA, CBDA, CBCA or cannabinoids fermentation processes. For example, the microorganisms and the methods disclosed herein can convert a carbon substrate (such as sugar, alcohol, and/or fatty acid) at a rate of greater than 0.01%.

[0262] The genetic modifications to the cells described throughout can be made to produce CBGA, CBGVA, THCA, CBDA, CBCA or cannabinoids over what would have been made without any genetic modifications. For example, compared to a non-genetically altered cell, the genetically modified microorganisms described throughout can produce CBGA, CBGVA, THCA, CBDA, CBCA or cannabinoids greater than 1.1 times (compared to the production levels of a non-genetically modified microorganism or non-genetically altered cell).

[0263] In some cases, the cannabinoid can be THC, CBD, CBC, or any combination thereof. In other cases, the cannabinoid can be THCV, CBDV, CBCV, or any combination thereof.

Methods of Making CBGA, THCA, CBDA or CBCA or cannabinoids

[0264] The genetically modified cells or microorganisms described throughout can be used to make CBGA, THCA, CBDA, CBCA and/or cannabinoids, e.g., THC, CBD, and CBC. A substrate capable of being converted into a CBGA or a cannabinoid can be brought in contact with one or more of the following enzymes: acyl activating enzyme (AAE1); polyketide synthase (PKS); olivetolic acid cyclase (OAC); prenyltransferase (PT); THCA synthase (THCAS); CBDA synthase (CBDAS), CBCA synthase (CBCAS), HMG-Co reductase (HMG1), and/or farnesyl pyrophosphate synthetase (ERG20).

[0265] The CBGA, THCA, CBDA, CBCA or cannabinoids (e.g., THC, CBD, CBC) produced can be recovered and isolated from the modified cells. The CBGA, THCA, CBDA, CBCA or cannabinoids in some cases can be secreted into the media of a cell culture, in which the CBGA, THCA, CBDA, CBCA or cannabinoids is extracted directly from the media. In some cases, the CBGA, THCA, CBDA, CBCA or cannabinoids can be within the cell itself, and the cells will need to be lysed in order to recover the respective CBGA, THCA, CBDA, CBCA or cannabinoids. In some instances, both cases can be true, where some CBGA, THCA, CBDA, CBCA or cannabinoids are secreted and some remains within the cells. In this case, either method or both methods can be used.

[0266] The genetically modified cells or microorganisms described throughout can be used to make CBGVA and/or cannabinoids, e.g., THCV, CBDV, and CBCV. A substrate capable of being converted into a CBGVA or a cannabinoid can be brought in contact with one or more of the following enzymes: acyl activating enzyme (AAE1); polyketide synthase (PKS); olivetolic acid cyclase (OAC); prenyltransferase (PT); THCA synthase (THCAS); CBDA synthase (CBDAS), CBCA synthase (CBCAS), HMG-Co reductase (HMG1), and/or farnesyl pyrophosphate synthetase (ERG20).

[0267] The CBGVA or cannabinoids (e.g., THCV, CBDV, CBCV) produced can be recovered and isolated from the modified cells. The CBGVA or cannabinoids in some cases can be secreted into the media of a cell culture, in which the CBGVA or cannabinoids is extracted directly from the media. In some cases, the CBGVA or cannabinoids can be within the cell itself, and the cells will need to be lysed in order to recover the respective CBGVA or cannabinoids. In some instances, both cases can be true, where some CBGVA or cannabinoids are secreted and some remains within the cells. In this case, either method or both methods can be used.

[0268] Accordingly, disclosed herein is a method of making CBGA, CBGVA, THCA, CBDA, CBCA or a cannabinoid comprising (a) contacting the genetically modified microorganism with a medium comprising a carbon source, and (b) growing the genetically modified microorganism to produce the CBGA or cannabinoid. The genetically modified microorganism can comprise any microorganism disclosed throughout. For example, the microorganism can be a genetically modified microorganism capable of converting a carbon substrate into CBGA, CBGVA, THCA, CBDA, CBCA or a cannabinoid, the genetically modified microorganism comprising a heterologous nucleic acid encoding one or more of the enzymes disclosed throughout (e.g., microorganism can comprise a nucleic acid sequence encoding for one or more of the following enzymes: acyl activating enzyme (AAE1); polyketide synthase (PKS); olivetolic acid cyclase (OAC); prenyltransferase (PT); THCA synthase (THCAS); CBDA synthase (CBDAS), CBCA synthase (CBCAS); HMG-Co reductase (HMG1); farnesyl pyrophosphate synthetase (ERG20); or any combination thereof).

[0269] The carbon source can be any carbon source that can be used by the microorganism. In some cases, the carbon source can be a sugar, alcohol, and/or fatty acid. For example, the sugar, alcohol or fatty acid can include without limitation hexanoic acid, butyric acid, glucose, fructose, xylose, sucrose, dextrins, starch, xylan, cellulose, hemicellulose, arabinose, glycerol, ethanol, butanol, methanol, or any combination thereof. In some cases, the carbon source can be hexanoic acid. In some cases, the carbon source can be olivetolic acid. In other cases, the carbon source can be a mixture of one or more different types of carbon sources.

[0270] The cannabinoid produced by the methods disclosed throughout can be any cannabinoid including but not limited to Δ⁹-tetrahydrocannabinolic acid (THCA), cannabigerolic acid (CBGA); cannabidiolic acid (CBDA), cannabichromenic acid (CBCA), Δ⁹-tetrahydrocannabinol (THC), cannabidiol (CBD), cannabichromene (CBC), Δ⁹-tetrahydrocannabivarinic acid (THCVA), cannabidivarinic acid (CBDVA), cannabichromevarinic acid (CBCVA) or any combination thereof.

[0271] In some cases, the medium does not contain any cells. In other words, this reaction is performed in the media in vitro. In some cases, the reaction does not occur within a cell. For example, the conversion of hexanoic acid to hexanoyl-CoA can occur outside of a cell. In some cases, the conversion of hexanoyl-CoA to olivetolic acid can occur outside of a cell. In some cases, the conversion of olivetolic acid to CBGA can occur outside of a cell. In some cases, the conversion of CBGA to Δ9-tetrahydrocannabinolic acid can occur outside of a cell. In some cases, the conversion of Δ9-tetrahydrocannabinolic acid to Δ9-tetrahydrocannabinol can occur outside of a cell. In some cases, the conversion of CBGA to cannabidiolic acid can occur outside of a cell. In some cases, the conversion of cannabidiolic acid to cannabidiol can occur outside of a cell. In some cases, the conversion of CBGA to cannabichromenic acid can occur outside of a cell. In some cases, the conversion of cannabichromenic acid to cannabichromene can occur outside of a cell.

[0272] In some cases, the cannabinoid, such as CBGA, CBGVA, THCA, CBDA, or CBCA can be converted outside of a cell. For example, once CBGA, CBGVA, THCA, CBDA, or CBCA is produced, it can be either isolated (from the cell or the cell media or both). Once isolated it can be converted, enzymatically or non-enzymatically into other a different product, such as another type of cannabinoid. In some cases, the CBGA, CBGVA, THCA, CBDA, or CBCA is just secreted into the media by the microorganism that synthesized it, and then the CBGA, CBGVA, THCA, CBDA, or CBCA is directly converted enzymatically or non-enzymatically into other a different product, such as another type of cannabinoid.

[0273] In some cases, this reaction is contained within a cell that is within cell culture media. In other words, the reaction is performed in vivo. For example, the conversion of hexanoic acid to hexanoyl-CoA can occur within a cell. In some cases, the conversion of hexanoyl-CoA to olivetolic acid can occur within a cell. In some cases, the conversion of olivetolic acid to CBGA can occur within a cell. In some cases, the conversion of CBGA to Δ9-tetrahydrocannabinolic acid can occur within a cell. In some cases, the conversion of Δ9-tetrahydrocannabinolic acid to Δ9-tetrahydrocannabinol can occur within a cell. In some cases, the conversion of CBGA to cannabidiolic acid can occur within a cell. In some cases, the conversion of cannabidiolic acid to cannabidiol can occur within a cell. In some cases, the conversion of CBGA to cannabichromenic acid can occur within a cell. In some cases, the conversion of cannabichromenic acid to cannabichromene can occur within a cell.

[0274] In some cases, there is a combination of the two. Some reactions along the pathway can occur within a cell, whereas some of the reactions along the pathway occur outside of a cell.

[0275] In some cases, the medium is cell culture media. In other instances, the medium is water or other liquid in which the cells (for in vivo reactions) can survive (such as saline buffered water). In other instances, the medium is water or other liquid in which the enzymes (for in vitro reactions) are active.

[0276] The CBGA, CBGVA, THCA, CBDA, CBCA or cannabinoids produced herein can be useful inter alia in the manufacture of pharmaceutical compositions. Thus, disclosed herein is a method of making a pharmaceutical composition by using the products disclosed herein. In some cases, the CBGA, CBGVA, THCA, CBDA, CBCA or cannabinoids are mixed with excipients to produce pharmaceutical compositions.

[0277] Upon completion of the methods or reactions described throughout, the amount of a particular cannabinoid, e.g., THCA, CBDA, CBCA, THC, CBD, CBC, THCVA, CBDVA, CBCVA, THCV, CBDV or CBCV, present in the reaction mixture can be at least 10% (w/w), at least 8% (w/w), at least 9% (w/w), at least 7% (w/w), at least 6% (w/w), at least, 5% (w/w), at least 4% (w/w), at least 3% (w/w), at least 2% (w/w), at least 1% (w/w), at least 0.5% (w/w), or at least 0.01% (w/w) of the total cannabinoids in the reaction mixture. Upon completion of the methods or reactions described throughout, the amount of a particular cannabinoid, e.g., THCA, CBDA, CBCA, THC, CBD, CBC, THCVA, CBDVA, CBCVA, THCV, CBDV or CBCV, present in the reaction mixture can be at least about 20 g/L, 15 g/L, 10 g/L, 8 g/L, 5 g/L, 4 g/L, 3 g/L, 2 g/L, 1 g/L, 0.5 g/L, or 0.1 g/L.

[0278] Upon completion of the methods or reactions described throughout, the amount of a particular cannabinoid, e.g., THCA, CBDA, CBCA, THC, CBD, CBC, THCVA, CBDVA, CBCVA, THCV, CBDV or CBCV, present in the reaction mixture can be about 0.001% (w/w) to about 99% (w/w), about 0.01% (w/w) to about 25% (w/w), about 0.025% (w/w) to about 20% (w/w), about 0.05% (w/w) to about 15% (w/w), about 0.075% (w/w) to about 12% (w/w), about 0.1% (w/w) to about 10% (w/w), about 0.25% (w/w) to about 5% (w/w), about 0.5% (w/w) to about 1% (w/w), about 0.1% (w/w) to about 1% (w/w), about 0.1% (w/w) to about 0.5% (w/w), about 0% (w/w) to about 1% (w/w), and any range therebetween. In some instances, the reaction mixture comprises CBGA in a weight percentage of about 0.001% (w/w) to about 99% (w/w), about 0.01% (w/w) to about 25% (w/w), about 0.025% (w/w) to about 20% (w/w), about 0.05% (w/w) to about 15% (w/w), about 0.075% (w/w) to about 12% (w/w), about 0.1% (w/w) to about 10% (w/w), about 0.25% (w/w) to about 5% (w/w), about 0.5% (w/w) to about 1% (w/w), about 0.1% (w/w) to about 1% (w/w), about 0.1% (w/w) to about 0.5% (w/w), about 0% (w/w) to about 1% (w/w), and any range therebetween, of total cannabinoids in the reaction mixture. In other instances, the reaction mixture comprises CBGVA in a weight percentage of about 0.001% (w/w) to about 99% (w/w), about 0.01% (w/w) to about 25% (w/w), about 0.025% (w/w) to about 20% (w/w), about 0.05% (w/w) to about 15% (w/w), about 0.075% (w/w) to about 12% (w/w), about 0.1% (w/w) to about 10% (w/w), about 0.25% (w/w) to about 5% (w/w), about 0.5% (w/w) to about 1% (w/w), about 0.1% (w/w) to about 1% (w/w), about 0.1% (w/w) to about 0.5% (w/w), about 0% (w/w) to about 1% (w/w), and any range therebetween, of total cannabinoids in the reaction mixture. In other instances, the reaction mixture comprises THCA in a weight percentage of about 0.001% (w/w) to about 99% (w/w), about 0.01% (w/w) to about 25% (w/w), about 0.025% (w/w) to about 20% (w/w), about 0.05% (w/w) to about 15% (w/w), about 0.075% (w/w) to about 12% (w/w), about 0.1% (w/w) to about 10% (w/w), about 0.25% (w/w) to about 5% (w/w), about 0.5% (w/w) to about 1% (w/w), about 0.1% (w/w) to about 1% (w/w), about 0.1% (w/w) to about 0.5% (w/w), about 0% (w/w) to about 1% (w/w), and any range therebetween, of total cannabinoids in the reaction mixture. In other instances, the reaction mixture comprises CBDA in a weight percentage of about 0.001% (w/w) to about 99% (w/w), about 0.01% (w/w) to about 25% (w/w), about 0.025% (w/w) to about 20% (w/w), about 0.05% (w/w) to about 15% (w/w), about 0.075% (w/w) to about 12% (w/w), about 0.1% (w/w) to about 10% (w/w), about 0.25% (w/w) to about 5% (w/w), about 0.5% (w/w) to about 1% (w/w), about 0.1% (w/w) to about 1% (w/w), about 0.1% (w/w) to about 0.5% (w/w), about 0% (w/w) to about 1% (w/w), and any range therebetween, of total cannabinoids in the reaction mixture. In other instances, the reaction mixture comprises CBCA in a weight percentage of about 0.001% (w/w) to about 99% (w/w), about 0.01% (w/w) to about 25% (w/w), about 0.025% (w/w) to about 20% (w/w), about 0.05% (w/w) to about 15% (w/w), about 0.075% (w/w) to about 12% (w/w), about 0.1% (w/w) to about 10% (w/w), about 0.25% (w/w) to about 5% (w/w), about 0.5% (w/w) to about 1% (w/w), about 0.1% (w/w) to about 1% (w/w), about 0.1% (w/w) to about 0.5% (w/w), about 0% (w/w) to about 1% (w/w), and any range therebetween, of total cannabinoids in the reaction mixture.

### Exemplary Uses of the CBGA or Cannabinoids

[0279] Preparations of CBGA, CBGVA, THCA, CBDA, CBCA or cannabinoids obtained can be used for any and all uses. The CBGA, CBGVA, THCA, CBDA, CBCA or cannabinoids can be isolated and sold as purified products. Or these purified products (e.g., CBGA) can be a feedstock to make additional cannabinoids.

[0280] The cannabinoids made can be used to manufacture medicinal compounds.

[0281] Accordingly, in one aspect, disclosed is a use of CBGA, THCA, CBDA, or CBCA as a feedstock compound in the manufacture of a cannabinoid. In another aspect, disclosed is a use of a cannabinoid in the manufacture of a medicinal composition.

### Pharmaceutical Compositions and Routes of Administration

[0282] The cannabinoids (e.g., THC, CBD, CDC, THCV, CBDV, and/or CDCV) can include pharmaceutically acceptable derivatives or prodrugs thereof. A “pharmaceutically acceptable derivative” can mean means any pharmaceutically acceptable salt, ester, salt of an ester, pro-drug or other derivative thereof.

[0283] Pharmaceutically acceptable salts of the compounds of this invention include those derived from pharmaceutically acceptable inorganic and organic acids and bases. Examples of suitable acid salts include acetate, adipate, benzoate, benzenesulfonate, butyrate, citrate, digluconate, dodecylsulfate, formate, fumarate, glycolate, hemisulfate, heptanoate, hexanoate, hydrochloride, hydrobromide, hydroiodide, lactate, maleate, malonate, methanesulfonate, 2-naphthalenesulfonate, nicotinate, nitrate, palmoate, phosphate, picrate, pivalate, propionate, salicylate, succinate, sulfate, tartrate, tosylate and undecanoate. Salts derived from appropriate bases include alkali metal (e.g., sodium), alkaline earth metal (e.g., magnesium), ammonium and N-(alkyl)₄⁺ salts.

[0284] For preparing pharmaceutical compositions from the compounds of the present invention, pharmaceutically acceptable carriers include either solid or liquid carriers. Solid form preparations include powders, tablets, pills, capsules, cachets, suppositories, and dispersible granules. A solid carrier can be one or more substances, which also acts as diluents, flavoring agents, binders, preservatives, tablet disintegrating agents, or an encapsulating material. Details on techniques for formulation and administration are well described in the scientific and patent literature, see, e.g., the latest edition of Remington's Pharmaceutical Sciences, Maack Publishing Co, Easton Pa.

[0285] In powders, the carrier is a finely divided solid, which is in a mixture with the finely divided active component. In tablets, the active component is mixed with the carrier having the necessary binding properties in suitable proportions and compacted in the shape and size desired.

[0286] Suitable solid excipients are carbohydrate or protein fillers include, but are not limited to sugars, including lactose, sucrose, mannitol, or sorbitol; starch from corn, wheat, rice, potato, or other plants; cellulose such as methyl cellulose, hydroxypropylmethyl-cellulose, or sodium carboxymethylcellulose; and gums including arabic and tragacanth; as well as proteins such as gelatin and collagen. If desired, disintegrating or solubilizing agents are added, such as the cross-linked polyvinyl pyrrolidone, agar, alginic acid, or a salt thereof, such as sodium alginate.

[0287] Liquid form preparations include solutions, suspensions, and emulsions, for example, water or water/propylene glycol solutions. For parenteral injection, liquid preparations can be formulated in solution in aqueous polyethylene glycol solution.

[0288] The pharmaceutical preparation can be a unit dosage form. In such form the preparation is subdivided into unit doses containing appropriate quantities of the active component. The unit dosage form can be a packaged preparation, the package containing discrete quantities of preparation, such as packeted tablets, capsules, and powders in vials or ampoules. Also, the unit dosage form can be a capsule, tablet, cachet, or lozenge itself, or it can be the appropriate number of any of these in packaged form.

[0289] Suitable routes of administration include, but are not limited to, oral, intravenous, rectal, aerosol, parenteral, ophthalmic, pulmonary, transmucosal, transdermal, vaginal, otic, nasal, and topical administration. In addition, by way of example only, parenteral delivery includes intramuscular, subcutaneous, intravenous, intramedullary injections, as well as intrathecal, direct intraventricular, intraperitoneal, intralymphatic, and intranasal injections.

### Exemplary Uses of the Cannabinoids

[0290] Preparations of cannabinoids (e.g., CBGA, THCA, CBDA, CBCA, THC, CBD, CBC, CBGVA, THCVA, CBDVA, CBCVA, THCV, CBDV, CBCV) obtained can be used for any and all uses. The cannabinoids can be isolated and sold as purified products. Or these purified products can be a feedstock to make additional types of cannabinoids. For example, purified CBGA can be used as a feedstock to make other cannabinoids such as THCA, CBDA, CBCA, THC, CBD, and CBC. In another example, purified CB GVA can be used as a feedstock to make other cannabinoids such as THCVA, CBDVA, CBCVA, THCV, CBDV, and CBCV.

[0291] The cannabinoids made in the processes described throughout can be used to manufacture medicinal compounds. Accordingly, in one aspect, disclosed is a use of cannabinoids as a feedstock compound in the manufacture of a medicinal compound. For example, the cannabinoids can be subsequently processed to prepare a pharmaceutical formulation.

### Pharmaceutical Compositions and Routes of Administration

[0292] The cannabinoids also include pharmaceutically acceptable derivatives thereof. A “pharmaceutically acceptable derivative” means any pharmaceutically acceptable salt, ester, salt of an ester, or other derivative thereof.

[0293] Pharmaceutically acceptable salts of the compounds of this invention include those derived from pharmaceutically acceptable inorganic and organic acids and bases. Examples of suitable acid salts include acetate, adipate, benzoate, benzenesulfonate, butyrate, citrate, digluconate, dodecylsulfate, formate, fumarate, glycolate, hemisulfate, heptanoate, hexanoate, hydrochloride, hydrobromide, hydroiodide, lactate, maleate, malonate, methanesulfonate, 2-naphthalenesulfonate, nicotinate, nitrate, palmoate, phosphate, picrate, pivalate, propionate, salicylate, succinate, sulfate, tartrate, tosylate and undecanoate. Salts derived from appropriate bases include alkali metal (e.g., sodium), alkaline earth metal (e.g., magnesium), ammonium and N-(alkyl)₄+ salts.

[0294] For preparing pharmaceutical compositions from the compounds of the present invention, pharmaceutically acceptable carriers include either solid or liquid carriers. Solid form preparations include powders, tablets, pills, capsules, cachets, suppositories, and dispersible granules. A solid carrier can be one or more substances, which also acts as diluents, flavoring agents, binders, preservatives, tablet disintegrating agents, or an encapsulating material. Details on techniques for formulation and administration are well described in the scientific and patent literature, see, e.g., the latest edition of Remington's Pharmaceutical Sciences, Maack Publishing Co, Easton Pa.

[0295] In powders, the carrier is a finely divided solid, which is in a mixture with the finely divided active component. In tablets, the active component is mixed with the carrier having the necessary binding properties in suitable proportions and compacted in the shape and size desired.

[0296] Suitable solid excipients are carbohydrate or protein fillers include, but are not limited to sugars, including lactose, sucrose, mannitol, or sorbitol; starch from corn, wheat, rice, potato, or other plants; cellulose such as methyl cellulose, hydroxypropylmethyl-cellulose, or sodium carboxymethylcellulose; and gums including arabic and tragacanth; as well as proteins such as gelatin and collagen. If desired, disintegrating or solubilizing agents are added, such as the cross-linked polyvinyl pyrrolidone, agar, alginic acid, or a salt thereof, such as sodium alginate.

[0297] Liquid form preparations include solutions, suspensions, and emulsions, for example, water or water/propylene glycol solutions. For parenteral injection, liquid preparations can be formulated in solution in aqueous polyethylene glycol solution.

[0298] The pharmaceutical preparation can be a unit dosage form. In such form the preparation is subdivided into unit doses containing appropriate quantities of the active component. The unit dosage form can be a packaged preparation, the package containing discrete quantities of preparation, such as packeted tablets, capsules, and powders in vials or ampoules. Also, the unit dosage form can be a capsule, tablet, cachet, or lozenge itself, or it can be the appropriate number of any of these in packaged form.

[0299] Suitable routes of administration include, but are not limited to, oral, intravenous, rectal, aerosol, parenteral, ophthalmic, pulmonary, transmucosal, transdermal, vaginal, otic, nasal, and topical administration. In addition, by way of example only, parenteral delivery includes intramuscular, subcutaneous, intravenous, intramedullary injections, as well as intrathecal, direct intraventricular, intraperitoneal, intralymphatic, and intranasal injections.

[0300] One particular delivery system can be through the pulmonary system. In some cases, the cannabinoid can be for into a liquid and vaporized so that it can be inhaled. See e.g., U.S. Pat. No. 9,326,967. Vaporization of cannabinoids and delivery through the pulmonary system can result in quick absorption through the circulatory system and can provide extremely fast systemic effects. Further, vaporization can mimic one of the preferred ways in which natural cannabinoids are inhaled.

[0301] Additional delivery system that can work by intravenous injections. See e.g., WO2013009928A1. Similar to vaporization, this intravenous injection can provide extremely fast systemic effects.

[0302] Oral delivery systems, such as, delivery through the gastrointestinal tract, can be used to deliver the cannabinoids. For example, the oral delivery system can be in the form of a pharmaceutical dosage unit, food, drink, or anything that can be delivered through the gastrointestinal tract.

[0303] Treatment of Disease and Symptoms of Disease

[0304] The cannabinoids can be used to treat disease, in particular to treat disease of people that are in need thereof. This includes treating one or more symptoms of the diseases. For example, the cannabinoids can be used to treat one of more of the following diseases: anorexia, multiple sclerosis, neurodegenerative disorders, such as Parkinson's disease, Huntington's disease, Tourette's syndrome, and Alzheimer's disease, epilepsy, glaucoma, osteoporosis, schizophrenia, bipolar disorder, post-traumatic stress disorder (PTSD), asthma, cardiovascular disorders, cancer, obesity, or metabolic syndrome-related disorders.

[0305] The cannabinoids can be used to treat one or more symptoms of disease, such as depression, anxiety, insomnia, emesis, pain, or inflammation.

[0306] Some of the diseases or symptom of disease can be exclusive to humans, but other diseases or symptom of disease can be shared in more than one animal, such as in all mammals.

### Recreational Uses

[0307] The cannabinoids produced by the microorganism and methods described throughout can be used for recreational use. For example, the cannabinoids, such as Δ⁹-tetrahydrocannabinolic acid (THCA), cannabidiolic acid (CBDA), cannabichromenic acid (CBCA), Δ⁹-tetrahydrocannabinol (THC), cannabidiol (CBD), cannabichromene (CBC), Δ⁹-tetrahydrocannabivarinic acid (THCVA), cannabidivarinic acid (CBDVA), cannabichromevarinic acid (CBCVA), or any combination thereof, can be used for non-medical uses.

[0308] In some cases, the cannabinoid can be formed into a liquid and vaporized so that it can be inhaled. See e.g., U.S. Pat. No. 9,326,967. Vaporization of cannabinoids and delivery through the pulmonary system can be used and can be preferred by some recreational users. For example, recreational users who do not like the smell of burning cannabis or those that are afraid of the effects of inhaling burning substances, can use this method. Further, since this method is not invasive and can be used almost anywhere, recreational users can prefer this method.

[0309] In some cases, the cannabinoid can be formed into something that can be injected, e.g., injected intravenously. This method can be used in order to deliver substances quickly and efficiently within the blood stream. For example, this liquid can be injected into the saline solution (colloquially known as “IV”) used in hospitals to keep patients hydrated. Further, intravenous injections can be used by recreational users for immediate effects. In some cases, the intravenous cannabinoid injections can be used to treat other drug addictions, such as heroin addiction.

[0310] In additional cases, the cannabinoids produced from the microorganisms and methods described throughout can be used as an additive to food or drink. For example, the cannabinoids can be used, for example, in baked goods, such as brownies or cakes. Additionally, the cannabinoids can be added to a beverage such as water, soda, beer, liquor, etc.

[0311] Other recreational ways to use the cannabinoids include but are not limited to patches; (similar to nicotine patches); topically (such as in lotions); sprays (breath freshener), or tinctures (mouth drops).

[0312] The disclosure is now described with reference to the following examples. These examples are provided for the purpose of illustration only and the disclosure should in no way be construed as being limited to these examples, but rather should be construed to encompass any and all variations which become evident as a result of the teaching provided herein.

### EXAMPLES

### Example 1—Plasmid Construction

[0313] A prenyltransferase of interest was identified. The amino acid sequence (SEQ ID NO: 1) was used by Genscript to design and synthesize the yeast codon optimized sequence coding for the prenyltransferase and used in the experiments.

[0314] Plasmids were constructed using the GeneArt Seamless Cloning and Assembly from Thermo Fisher Scientific. The RUNM000898_511.1 vector (SEQ ID NO: 3) contained the Saccharomyces cerevisiae 2μ replication origin, the URA3 gene as an auxotrophic marker and the PKS and OAC genes under the regulation of the bidirectional GAL1/GAL10 promoter. The bCBGA0098 vector (SEQ ID NO: 4) contained the Saccharomyces cerevisiae 2μ replication origin, the LEU2 gene as an auxotrophic marker and the AAE1 and PT genes under the regulation of the bidirectional GAL1/GAL10 promoter. The bCBGA0306 vector (SEQ ID NO: 25) contained the Saccharomyces cerevisiae 2μ replication origin, the LEU2 gene as an auxotrophic marker and the PT gene under the regulation of the bidirectional GAL1/GAL10 promoter.

### Example 2—yCBGA0172 Strain Construction

[0315] The parental strain for all examples was the Saccharomyces cerevisiae CEN.PK2-1C strain. Its genotype is: MATA, ura3-52; trp1-289; leu2-3,112; his3Δ 1; MAL2-8^{C}; SUC2.

[0316] A mutant ERG20 allele was integrated into the GAL80 locus of the host. First, a plasmid was constructed carrying an ERG20 allele with two mutations: F96W and N127W. Second, the ERG20 allele together with the adjacent HygMX cassette was amplified in a PCR reaction and flanking sequences of the chromosomal GAL80 coding sequence were incorporated during the PCR reaction using oligonucleotides with 5′ extensions. Third, this DNA fragment was transformed into the host strain by electroporation. Finally, the strain with integrated mutant ERG20 sequence at the GAL80 locus were identified by its hygromycin B resistance and referred to as yCBGA0172.

[0317] Plasmids RUNM000898_511.1 (SEQ ID NO: 3) and bCBGA0098 (SEQ ID NO: 4) were transformed into the yCBGA0172 strain by electroporation. Transformants were selected by their leucine and uracil prototrophy on SD/MSG minimal medium (20 g/L glucose, 1.7 g/L yeast nitrogen base w/o ammonium sulphate and amino acids, 1 g/L monosodium glutamic acid, 20 g/L agar when solid medium is to be used) supplemented with histidine and tryptophan.

[0318] In another example plasmid bCBGA0306 (SEQ ID NO: 25) and the VVN4655922 plasmid were transformed into the yCBGA0172 strain by electroporation. The plasmid VVN4655922 encodes for the Saccharomyces cerevisiae HMG1 gene truncated of the first 530 amino acids and has the Saccharomyces cerevisiae TRP1 gene as an auxotrophic selection marker. Transformants were selected by their leucine and tryptophan prototrophies on SD/MSG minimal medium supplemented with histidine and uracil.

### Example 3—Growth

[0319] Transformant colonies were picked and inoculated into separate wells of a 96-well deep well plate. Each well contained 400 μl Synthetic Defined (SD)/MSG liquid medium supplemented with histidine and tryptophan. These inoculums were grown overnight at 30° C. and shaken at 300 rpm with a 50 mm shaking diameter.

[0320] After the overnight growth the samples were centrifuged, the supernatant discarded and cells transformed with plasmids RUNM000898_511.1 and bCBGA0098 were re-suspended in 400 μl YPD-HXA (10 g/L yeast extract, 20 g/L peptone, 20 g/L glucose and 100 mg/L hexanoic acid) medium. In case of cultures transformed with plasmids bCBGA0306 and VVN4655922 the pelleted cells were re-suspended in 400 μl YPD-OLA (10 g/L yeast extract, 20 g/L peptone, 20 g/L glucose and 40 mg/L olivetolic acid) medium.

[0321] Then samples were grown for 16 hours at 30° C. and shaken at 300 rpm with a 50 mm shaking diameter and 16 μl 50% glucose was added to the samples. Samples grown in YPD-OLA medium were supplemented additionally with 20 μl of 800 mg/L olivetolic acid solution too.

[0322] Finally, samples were grown for additional 32 hours and were analyzed for CBGA titers.

### Example 4—Sample Processing and Analytics

[0323] The samples were processed by adding 400 μl acetonitrile, then shaken for 5 minutes at 30° C. at 300 rpm with 50 mm throw. The samples were then centrifuged at 400 rpm for 5 minutes. 200 μl of supernatant were transferred into a new 96 well plate.

[0324] The new 96 well plate were transferred to a Waters Acquity UPLC (Binary pump)-TQD MS and set with the following parameters:
[0325] Instrument: Waters Acquity UPLC (Binary pump)-TQD MS
[0326] Stationary phase: Agilent Eclipse Plus C18 RRHD 1.8 mm, 2.1×50 mm
[0327] Mobile phase A: water 0.1% FA
[0328] Mobil phase B: acetonitrile 0.1% FA
[0329] Gradient info (Table 1):

TABLE 1

| Time [min] | % A | % B |
|---|---|---|
| 0 | 55 | 45 |
| 0.5 | 45 | 55 |
| 0.6 | 30 | 70 |
| 2.0 | 30 | 70 |
| 2.1 | 0 | 100 |
| 2.2 | 0 | 100 |
| 2.3 | 55 | 45 |

[0330] Flow: 0.4 mL/min
[0331] Column temp: 35° C.
[0332] Detection: Acquity TQD, MRM Mode (361.2»219.1; 361.2»149.0; 361.2»237.1; 361.2»343.2)

[0333] Using the strains and methods described above CBGA was produced at 200 μg/L concentration when YPD-HXA medium was used and at 15 mg/L concentration when YPD-OLA medium was used. A representative chromatogram of the sample and the CBGA standard can be seen in FIG. 2.

### Example 5—the yCBGA0189, yCBGA0197 and yCBGA0201 Strains: Testing Additional Prenyl Transferases

[0334] A modified sequence with higher prenyl transferase activity was constructed and referred to as GFP-dPT (polynucleotide sequence: SEQ ID NO: 26; amino acid sequence: SEQ ID NO: 27). The GFP-dPT gene is a fusion of two polynucleotide sequences: a gene of a modified fluorescent protein yEVenus (SEQ ID NO: 28) from the plasmid pKT90 and a truncated version of SEQ ID NO: 2 missing its first 246 nucleotides.

[0335] Plasmids were constructed using the GeneArt Seamless Cloning and Assembly from Thermo Fisher Scientific. The bCBGA0385 vector (SEQ ID NO: 29) contained the Saccharomyces cerevisiae 2μ replication origin, the LEU2 gene as an auxotrophic marker and the GFP-dPT gene under the regulation of the bidirectional GAL1/GAL10 promoter. The bCBGA0305 vector (SEQ ID NO: 30) contained the Saccharomyces cerevisiae 2μ replication origin, the TRP1 gene as an auxotrophic marker and the AAE1 gene under the regulation of the bidirectional GAL1/GAL10 promoter.

[0336] For testing the GFP-dPT activity a new parental strain was constructed: a polynucleotide fragment of the RUNM000898_511.1 vector coding for OAC, PKS and URA3 genes was transformed into the strain yCBGA0172 by electroporation. The strain with OAC, PKS and URA3 genes inserted was identified by its uracil prototrophy on SD/MSG minimal medium supplemented with histidine, tryptophan and leucine and referred to as yCBGA0189.

[0337] In an another experiment a polynucleotide fragment coding for the truncated version of HMG1 gene lacking its first 530 amino acids and a KanMX cassette was transformed into the strain yCBGA0172 by electroporation. The strain with truncated HMG1 gene inserted was identified by its G418 resistance and referred to as yCBGA0197.

[0338] The strain yCBGA0197 was transformed with a vector coding for the Saccharomyces cerevisiae HO gene and URA3 gene. The plasmid was cured and a clone with MAT alpha mating type was identified using standard laboratory methods. Finally, this MAT alpha clone was mated with yCBGA0189 and the isolated diploid strain is referred to as yCBGA0201.

[0339] Plasmids bCBGA0305 and bCBGA0385 were transformed into the yCBGA0201 strain by electroporation. Transformants were selected by their leucine and tryptophan prototrophies on SD/MSG minimal medium supplemented with histidine.

[0340] In another example, plasmid bCBGA0385 was transformed into the yCBGA0197 strain by electroporation. Transformants were selected by their leucine prototrophy on SD/MSG minimal medium supplemented with histidine, uracil and tryptophan.

[0341] Transformant colonies were picked and inoculated into separate wells of a 96-well deep well plate. Each well contained 400 μl SD/MSG liquid medium supplemented with histidine in case of strains containing both bCBGA0305 and bCBGA3085 and with histidine, uracil and tryptophan in case of strains containing bCBGA0385 plasmid alone. These inoculums were grown overnight at 30° C. and shaken at 300 rpm with a 50 mm shaking diameter.

[0342] After the overnight growth the samples were centrifuged, the supernatant discarded and cells re-suspended in 400 μl YPD-HXA (10 g/L yeast extract, 20 g/L peptone, 20 g/L glucose and 100 mg/L hexanoic acid) medium or 400 μl YPD-800LA (10 g/L yeast extract, 20 g/L peptone, 20 g/L glucose and 80 mg/L olivetolic acid) medium. In case of cultures transformed with only bCBGA0385 plasmid the YPD-800LA medium was used.

[0343] The samples were grown for 16 hours at 30° C. and shaken at 300 rpm with a 50 mm shaking diameter and 16 μl 50% glucose was added to the samples.

[0344] Finally, samples were grown for additional 32 hours and were analyzed for CBGA titers as described in “Example 4—Sample processing and analytics”.

[0345] Using the strains and methods described above CBGA was produced at 11 mg/L concentration when YPD-HXA medium was used and at 50 mg/L concentration when YPD-800LA medium was used.

### Example 6—Mutant Prenyl Transferase

[0346] Another modified sequence with increased prenyl transferase activity was constructed and referred to as ERG20mut-dPT (polynucleotide sequence: SEQ ID NO: 31; amino acid sequence: SEQ ID NO: 32). The ERG20mut-dPT gene is a fusion of two polynucleotide sequences: ERG20 gene with F96W and N127W mutations and a truncated version of SEQ ID NO: 2 missing its first 246 nucleotides.

[0347] Plasmid was constructed using the GeneArt Seamless Cloning and Assembly from Thermo Fisher Scientific. The bCBGA0559 vector (SEQ ID NO: 33) contained the Saccharomyces cerevisiae 2μ replication origin, the LEU2 gene as an auxotrophic marker and the ERG20mut-dPT gene under the regulation of the bidirectional GAL1/GAL10 promoter.

[0348] bCBGA0559 was transformed into the yCBGA0197 strain by electroporation. Transformants were selected by their leucine prototrophy on SD/MSG minimal medium supplemented with histidine, uracil and tryptophan.

[0349] Transformant colonies were picked and inoculated into separate wells of a 96-well deep well plate. Each well contained 400 μl SD/MSG liquid medium supplemented with histidine, uracil and tryptophan. These inoculums were grown overnight at 30° C. and shaken at 300 rpm with a 50 mm shaking diameter.

[0350] After the overnight growth the samples were centrifuged, the supernatant discarded and cells re-suspended in 400 μl YPD-1200LA (10 g/L yeast extract, 20 g/L peptone, 20 g/L glucose and 120 mg/L olivetolic acid) medium.

[0351] Then samples were grown for 16 hours at 30° C. and shaken at 300 rpm with a 50 mm shaking diameter and 16 μl 50% glucose was added to the samples.

[0352] Finally, samples were grown for additional 32 hours and were analyzed for CBGA titers as described in Example 4—Sample processing and analytics.

[0353] Using the strains and methods described above CBGA was produced at 90 mg/L concentration.

### Example 7—the yCBGA0237, yCBGA0253 and yCBGA0254 Strains: ERG20 Promoter Truncation

[0354] yCBGA0237 strain was constructed by deleting the HygMX and KanMX cassettes from the yCBGA0197 strain and inserting the GFP-dPT gene under the regulation of the bidirectional GAL1/GAL10 promoter into the YJL144W locus by replacing the native YJL144W open reading frame (ORF). Two more strains were constructed by deleting different fragments from the promoter of the native ERG20 allele of the yCBGA0237 strain. The yCBGA0253 strain contains a 133 nucleotide long deletion between 143 and 275 nucleotides upstream of the translational start site. The yCBGA0254 strain contains a 422 nucleotide long deletion between 69 and 490 nucleotides upstream of the translational start site.

[0355] Strains yCBGA0237, yCBGA0253 and yCBGA0254 were inoculated into separate wells of a 96-well deep well plate. Each well contained 400 μl SD/MSG liquid medium supplemented with histidine, leucine, uracil and tryptophan. These inoculums were grown overnight at 30° C. and shaken at 300 rpm with a 50 mm shaking diameter.

[0356] After the overnight growth 40 μl of the samples were transferred into 360 μl YPD-1200LA (10 g/L yeast extract, 20 g/L peptone, 20 g/L glucose and 120 mg/L olivetolic acid) medium.

[0357] Then samples were grown for 16 hours at 30° C. and shaken at 300 rpm with a 50 mm shaking diameter and 16 μl 50% glucose was added to the samples.

[0358] Finally, samples were grown for additional 32 hours and were analyzed for CBGA titers as described in Example 4—Sample processing and analytics.

[0359] Using the strains and methods described above, yCBGA0237 strain produced 53 mg/L CBGA and yCBGA0253 and yCBGA0254 reached 96 and 78 mg/L CBGA concentration, respectively.

### Example 8—Olivetolic Acid Conversion to THCA

[0360] A plasmid was constructed using the GeneArt Seamless Cloning and Assembly from Thermo Fisher Scientific. The RUNM001233_51.1 vector (SEQ ID NO: 34) contained the Saccharomyces cerevisiae 2μ replication origin, the URA3 gene as an auxotrophic marker and the THCA synthase gene under the regulation of the bidirectional GAL1/GAL10 promoter.

[0361] For testing the olivetolic acid conversion into THCA the RUNM001233_51.1 and bCBGA0385 vectors were transformed into the strain yCBGA0197 by electroporation. Transformants were selected by their leucine and uracil prototrophies on SD/MSG minimal medium supplemented with histidine and tryptophan.

[0362] Transformant colonies were picked and inoculated into separate wells of a 96-well deep well plate. Each well contained 400 μl SC-URA-LEU (6.7 g/L Yeast Nitrogen Base, 1.6 g/L Amino Acid Drop Out mix without uracil and leucine, 22 g/L glucose, buffered to pH 6.0). These inoculums were grown for 48 hours at 30° C. and shaken at 300 rpm with a 50 mm shaking diameter.

[0363] After the 48 hours growth period the samples were centrifuged, the supernatant discarded and cells re-suspended in 400 μl YPD-1200LA (10 g/L yeast extract, 20 g/L peptone, 20 g/L glucose and 120 mg/L olivetolic acid) medium.

[0364] Then samples were grown for 16 hours at 30° C. and shaken at 300 rpm with a 50 mm shaking diameter and 16 μl 50% glucose was added to the samples.

[0365] Finally, samples were grown for additional 32 hours and were analyzed for THCA and CBGA titers as described below.

[0366] Using the strains and methods described above CBGA was produced at 2 mg/L concentration while THCA was produced at 84 mg/L concentration.

### Example 9—The yCBGA0269 Strain: Hexanoic Acid Conversion to THCA

[0367] Plasmids were constructed using the GeneArt Seamless Cloning and Assembly from Thermo Fisher Scientific. The RUNM001210_96.1 vector (SEQ ID NO: 35) contained the Saccharomyces cerevisiae 2μ replication origin, the URA3 gene as an auxotrophic marker, the PKS and OAC genes under the regulation of the bidirectional GAL1/GAL10 promoter and the AAE1 gene under the regulation of the STE5 promoter. The bCBGA0409 vector (SEQ ID NO: 36) contained the Saccharomyces cerevisiae 2μ replication origin, the LEU2 gene as an auxotrophic marker, the THCA synthase and PT genes under the regulation of the bidirectional GAL1/GAL10 promoter.

[0368] The yCBGA0251 strain was constructed by inserting the ERG20mut-dPT gene under the regulation of the bidirectional GAL1/GAL10 promoter into the YMR145C locus by replacing the native YMR145C ORF of the yCBGA0237 strain. The yCBGA0269 strain was constructed by deleting a 133 nucleotide long fragment between 143 and 275 nucleotides upstream of the translational start site of the native ERG20 allele of the yCBGA0251 strain. Plasmids RUNM001210_96.1 and bCBGA0409 were transformed into the yCBGA0269 strain by electroporation. Transformants were selected by their uracil and leucine prototrophy on SD/MSG minimal medium supplemented with histidine and tryptophan.

[0369] Transformant colonies were picked and inoculated into separate wells of a 96-well deep well plate. Each well contained 400 μl SC-URA-LEU (6.7 g/L Yeast Nitrogen Base, 1.6 g/L Amino Acid Drop Out mix without uracil and leucine, 22 g/L glucose, buffered to pH 6.0). These inoculums were grown for 48 hours at 30° C. and shaken at 300 rpm with a 50 mm shaking diameter. After the 48 hours growth period 40 μl samples of these cultures were inoculated into 360 μl YPD-HXA (10 g/L yeast extract, 20 g/L peptone, 20 g/L glucose and 100 mg/L hexanoic acid) medium. Then samples were grown for 16 hours at 30° C. and shaken at 300 rpm with a 50 mm shaking diameter and 40 μg hexanoic acid dissolved in 8 μl ethanol was added to the samples. Finally, samples were grown for additional 32 hours and were analyzed for THCA and CBGA titers as described below.

[0370] Using the strains and methods described above CBGA was produced at 34 mg/L concentration while THCA was produced at 23 mg/L concentration.

### Example 10—Additional Sample Processing

[0371] The samples from examples 8 and 9 were processed by dilution with acetonitrile:water mixture (the composition of the mixture depends on the dilution factor, to reach 50% acetonitrile content for further processing), then shaken for 5 minutes at 30° C. at 300 rpm with 50 mm throw. The samples were then centrifuged at 400 rpm for 5 minutes. 200 μl of supernatant were transferred into a new 96 well plate.

[0372] The new 96 well plate were transferred to a Waters Acquity UPLC (Binary pump)-TQD MS and set with the following parameters:
[0373] Instrument: Waters Acquity UPLC (Binary pump)-TQD MS
[0374] Stationary phase: Agilent Eclipse Plus C18 RRHD 1.8 mm, 2 1×50 mm
[0375] Mobile phase A: water 0.1% FA
[0376] Mobil phase B: acetonitrile 0.1% FA
[0377] Gradient info (Table 2):

TABLE 2

| Time [min] | A [%] | B [%] |
|---|---|---|
| 0 | 55 | 45 |
| 0.5 | 45 | 55 |
| 0.6 | 30 | 70 |
| 2.0 | 30 | 70 |
| 2.1 | 5 | 95 |
| 3.1 | 5 | 95 |
| 3.2 | 55 | 45 |
| 5.5 | 55 | 45 |

[0378] Flow: 0.4 mL/min
[0379] Column temp: 35° C.
[0380] Detection: Acquity TQD, MRM Mode (361.2>>219.1; 361.2>>149.0; 361.2>>237.1; 361.2>>343.2); UV at 280 nm wavelength.

[0381] Representative chromatograms of a THCA containing sample can be seen in FIG. 3 (MRM chromatogram) and FIG. 4 (UV chromatogram).

### Example 11—the yCBGA0314 Strain: Strains with Increased Prenyl Transferase Copy Number

[0382] Increased Prenyl Transferase copy number and promoter truncation improves prenyl transferase activity. The yCBGA0314 strain was constructed and tested for the effect of PT copy number on CBGA production. The yCBGA0314 strain was constructed by inserting the ERG20mut-dPT gene under the regulation of the bidirectional GAL1/GAL10 promoter into the LPP1 locus by replacing the native LPP1 ORF of the yCBGA0269 strain. The yCBGA0314 strain and several other previously described strains are listed in Table 3 below along with their respective gene insertions/mutations:

TABLE 3

| | Mutant | | | |
|---|---|---|---|---|
| | ERG20 | | | |
| | integration; | | | |
| | truncated | GFP-dPT | ERG20mut- | |
| | HMG1 | copy | dPT copy | Promoter |
| Strain ID | integration | number | number | truncation |
| yCBGA0197 | + | 0 | 0 | 0 |
| yCBGA0237 | + | 1 | 0 | 0 |
| yCBGA0251 | + | 1 | 1 | 0 |
| yCBGA0269 | + | 1 | 1 | + |
| yCBGA0314 | + | 1 | 2 | + |

[0383] Transformant colonies were grown using the following protocol: Transformant colonies were inoculated into wells of a 96-well deep well plate. Each well contained 400 μl SC Medium (6.7 g/L Yeast Nitrogen Base, 1.6 g/L Amino Acid Drop Out mix without leucine, uracil, tryptophan and histidine, 22 g/L glucose, buffered to pH 6.0, supplemented with leucine, uracil, tryptophan and histidine). These inoculums were grown for 48 hours at 30° C. and shaken at 300 rpm with a 50 mm shaking diameter. After the 48 hours growth period, 40 μl samples of these cultures were inoculated into 360 μl YPD-2400LA (10 g/L yeast extract, 20 g/L peptone, 20 g/L glucose and 240 mg/L olivetolic acid) medium. Then samples were grown for 24 hours at 30° C. and shaken at 300 rpm with a 50 mm shaking diameter and 8 μl of 12000 mg/L OLA dissolved in EtOH was added to the samples. Finally, the samples were grown for additional 24 hours and were analyzed for cannabinoids.

[0384] The yCBGA0314 strain produced 450 mg/L CBGA using 480 mg/L olivetolic acid as substrate.

### Example 12—Preventing Hexanoic Acid Degradation and Increasing CBGA Titers

[0385] Cannabinoid production can be limited by the availability of hexanoic acid. We tested to see if the availability of hexanoic acid can be increased by knocking out several genes of the beta-oxidation pathway. In particular, we tested to see if hexanoic acid degradation could be prevented or minimized. Deletion of FAA1, FAA4, FAT1, PXA1, PXA2 and PEX11 had no obvious effect on hexanoic acid titers: after 24 hours of growth in YPD-HXA medium the hexanoic acid concentration was dropped below 5% of the original level (no heterologous cannabinoid pathway genes present). In other words, hexanoic degradation was not affected. A wild type control strain performed similarly, resulting in less than 5% final hexanoic acid concentration. However, deletion of the FOX1 gene (a.k.a. PDX1, systematic name YGL205W) increased hexanoic acid titers. The knockout of FOX1 eliminated HXA degradation almost completely: 95% of the original hexanoic concentration was still present at the end of the 24 hour long growth period.

[0386] Yeast strains having the ability to make CBGA were also knocked out for the FOX1 gene. yCBGA0326 strain was constructed by first, inserting the PKS and OAC genes under the regulation of the bidirectional GAL1/GAL10 promoter and the AAE1 gene under the regulation of the HXK1 promoter into the YGL202W locus replacing the native YGL202W ORF, second, inserting the PKS and OAC genes under the regulation of the bidirectional GAL1/GAL10 promoter and the AAE1 gene under the regulation of the HXK1 promoter into the DPP1 locus replacing the native DPP1 ORF, third, inserting the PKS and OAC genes under the regulation of the bidirectional GAL1/GAL10 promoter into the BTS1 locus replacing the native BTS1 ORF. yCBGA0373 strain was constructed by deleting the FOX1 gene, more specifically the nucleotide fragment between −73 and 3243 relative to the translational start site.

[0387] Strains yCBGA0326 and yCBGA0373 were inoculated into separate wells of a 96-well deep well plate. Each well contained 400 μl Synthetic Complete (SC) liquid medium (6.7 g/L Yeast Nitrogen Base, 1.6 g/L Amino Acid Drop Out mix without uracil and leucine, 22 g/L glucose, buffered to pH 6.0, supplemented with leucine and uracil). These inoculums were grown for 48 hours at 30° C. and shaken at 300 rpm with a 50 mm shaking diameter. After the 48 hours growth period 40 μl samples of these cultures were inoculated into 360 μl YPD-50HXA (10 g/L yeast extract, 20 g/L peptone, 20 g/L glucose and 50 mg/L hexanoic acid) medium. Then samples were grown for 24 hours at 30° C. and shaken at 300 rpm with a 50 mm shaking diameter, then 20 μg hexanoic acid dissolved in 8 μl ethanol was added to the samples. Finally, samples were grown for additional 24 hours and four replicates of both strains were analyzed for CBGA titers.

[0388] Using the methods described above, CBGA, olivetol, and olivetol acid titers were measured. As seen in FIG. 5, yCBGA0326 produced 14.3 mg/L CBGA and 28.4 mg/L olivetol while the strain yCBGA0373 deleted for the FOX1 gene produced 39.7 mg/L CBGA, 19.6 mg/L olivetolic acid and 66.1 mg/L olivetol.

### Example 13—Strain with Increased AAE1—TKS—OAC Copy Number

[0389] Increasing the copy number of genes required for olivetolic acid production increased the corresponding CBGA titer. The yCBGA0268 strain was constructed by replacing the native YGL202W ORF of the yCBGA0251 strain by inserting the PKS and OAC genes under the regulation of the bidirectional GAL1/GAL10 promoter and the AAE1 gene under the regulation of the HXK1 promoter into the YGL202W locus. The yCBGA0268 strain and several other previously described strains are listed below along with their respective gene insertions/mutations. The Table 4 illustrates how copy number of the olivetolic acid biosynthetic genes increases the final CBGA titer.

TABLE 4

| | Combined | | | | | CBGA |
|---|---|---|---|---|---|---|
| | GFP-dPT | | Copy | Copy | | titer |
| | and | Copy | num- | num- | Dele- | (mg/L); |
| | ERG20mut- | number | ber | ber | tion | hexanoic |
| | dPT copy | of | of | of | of | acid as |
| Strain ID | number | CsAAE1 | PKS | OAC | FOX1 | substrate |
| yCBGA0251 | 2 | 0 | 0 | 0 | 0 | 0 |
| yCBGA0268 | 2 | 1 | 1 | 1 | 0 | 14 |
| yCBGA0326 | 2 | 1 | 3 | 3 | 0 | 31 |
| yCBGA0373 | 2 | 1 | 3 | 3 | + | 63 |

### Example 14—the yCBGA0513 Strain: Strain with Increased Prenyl Transferase Copy Number+Increased AAE1-TKS-OAC Copy Number

[0390] The yCBGA0513 strain, a strain containing multiple copies of prenyl transferase and genes required for olivetolic acid production, was constructed. The strain produced increased levels of CBGA using hexanoic acid as its substrate. For the strain construction, the parental strain was the yCBGA0314 strain which contained 3 copies of GFP-dPT and/or ERGOmut-dPT genes in total among other host modifications as described above. Three copies of the PKS and OAC genes under the regulation of the bidirectional GAL1/GAL10 promoter and three copies of the AAE1 gene under the regulation of the STE5 promoter were inserted into the YDR508C, YRL020C and FOX1 loci replacing the native ORFs of the yCBGA0314 strain. A large number of isolates from this transformation were screened and an isolate with high CBGA productivity and the best reproducibility was identified. Next, to complement the auxotrophic mutations of this strain, URA3, HISS LEU2 and TRP1 genes on a single fragment were inserted 3′ of the genomic ARG2 locus, resulting in the final yCBGA0513 strain.

[0391] Colonies were inoculated into wells of a 96-well deep well plate. Each well contained 400 μl SC (6.7 g/L Yeast Nitrogen Base, 1.6 g/L Amino Acid Drop Out mix without leucine, uracil, tryptophan and histidine, 22 g/L glucose, buffered to pH 6.0, supplemented with leucine, uracil, tryptophan and histidine). These inoculums were grown for 48 hours at 30° C. and shaken at 300 rpm with a 50 mm shaking diameter. After the 48 hours growth period 40 μl samples of these cultures were inoculated into 360 μl YPD-HXA (10 g/L yeast extract, 20 g/L peptone, 20 g/L glucose and 100 mg/L hexanoic acid) medium. Then samples were grown for 24 hours at 30° C. and shaken at 300 rpm with a 50 mm shaking diameter and 40 μg hexanoic acid dissolved in 8 μl ethanol was added to the samples. Finally, the samples were grown for additional 24 hours and were analyzed for cannabinoids.

[0392] The yCBGA0513 strain was able to produce 140 mg/L CBGA in a standard high throughput screen. 1) The high prenyl transferase activity and optimized GPP productivity, as described for the parental yBGA0314 strain, 2) the replacement of the FOX1 gene that minimizes the degradation of hexanoic acid, and 3) and/or the integration of more than 3 copies of the genes required for olivetolic acid synthesis likely contribute to the high CBGA productivity.

[0393] To further test the potential of the yCBGA0513 strain, it was challenged in a modified screening procedure. yCBGA0513 strain was inoculated into wells of a 96-well deep well plate. Each well contained 400 μl SC liquid medium (6.7 g/L Yeast Nitrogen Base, 1.6 g/L Amino Acid Drop Out mix without leucine, uracil, tryptophan and histidine, 22 g/L glucose, buffered to pH 6.0, supplemented with leucine, uracil, tryptophan and histidine). These inoculums were grown for 48 hours at 30° C. and shaken at 300 rpm with a 50 mm shaking diameter. After the 48 hours growth period 40 μl samples of these cultures were inoculated into 360 μl YPD-HXA (10 g/L yeast extract, 20 g/L peptone, 20 g/L glucose and 100 mg/L hexanoic acid) medium. Then samples were grown for 96 hours at 30° C. and shaken at 300 rpm with a 50 mm shaking diameter and 40 μg hexanoic acid dissolved in 8 μl ethanol was added to the samples at two time-points: at 24 and 48 hour. At the end of the 96 hour growth period, the samples were analyzed for cannabinoids. The yCBGA0513 strain produced 300 mg/L CBGA using hexanoic acid as substrate.

### Example 15—the yCBGA0520, yCBGA0523 and yCBGA0526 Strains: Strains with Increased Prenyl Transferase Copy Number+Genes Required for Olivetolic Acid Production

[0394] Several additional strains containing multiple copies of prenyl transferase and genes required for olivetolic acid production were constructed utilizing yCBGA0513 as the parent strain. The yCBGA0520, yCBGA0523 and yCBGA0526 strains are able to produce high levels of CBGA using hexanoic acid as substrate. The yCBGA0520 strain was constructed by inserting the ERG13 gene (encoding Hydroxymethylglutaryl-CoA synthase) under the regulation of the ADH2 promoter, the HMG1 gene (encoding Hydroxymethylglutaryl-CoA reductase) under the regulation of the TEF1 promoter, and the ERG20mut-dPT gene with a TPI1 terminator under the regulation of the HXK1 promoter into the ATG26 locus by replacing the native ATG26 ORF of the yCBGA0513 strain. The yCBGA_0523 strain was constructed by inserting the tHMG1 gene under the regulation of the ADH2 promoter, the ERG10 gene (encoding Acetyl-CoA C-acetyltransferase) under the regulation of the TEF1 promoter, and the ERG13 gene under the regulation of the HXK1 promoter into the ATG26 locus by replacing the native ATG26 locus of the yCBGA0513 strain. The yCBGA_0526 strain was constructed by inserting the tHMG1 gene under the regulation of the ADH2 promoter, the ERG13 gene under the regulation of the TEF1 promoter, and the AAE1 gene with a TEF1 terminator under the regulation of the HXK1 promoter into the ATG26 locus by replacing the native ATG26 ORF of the yCBGA0513 strain. tHMG1 stands for the Saccharomyces cerevisiae HMG1 gene truncated of the first 530 amino acids. ERG10, ERG13, HMG1 and tHMG1 gene cassettes contain their native terminator sequences. ERG20mut-dPT and AAE1 were described earlier. The ATG26 locus of the yCBGA0513 strain and the corresponding locuses in the yCBGA0520 strain, the yCBGA0523 strain, and the yCBGA0526 strain which replaced the ATG26 locus are disclosed in FIG. 13.

[0395] The strains and their gene insertions are listed in Table 5 below:

TABLE 5

| | | | | | | | | | | |
|---|---|---|---|---|---|---|---|---|---|---|
| | Target | Pro- | | Termi- | Pro- | | Termi- | Pro- | | Termi- |
| Strain | locus | moter1 | ORF1 | nator1 | moter2 | ORF2 | nator2 | moter3 | ORF3 | nator3 |

| yCBGA_ | ATG | ADH | ERG13 | TEF1 | HMG1 | HXK | ERG20mut- | TPI1 |
|---|---|---|---|---|---|---|---|---|
| 052 | | | | | | | dpt | |
| 0 | | | | | | | | |
| yCBGA_ | | | tHMG1 | | ERG1 | | ERG13 | |
| 052 | | | | | 0 | | | |
| 3 | | | | | | | | |
| yCBGA_ | | | | | ERG1 | | AAE1 | TEF |
| 052 | | | | | 3 | | | 1 |
| 6 | | | | | | | | |

[0396] tHMG1 stands for the Saccharomyces cerevisiae HMG1 gene truncated of the first 530 amino acids. ERG10, ERG13, HMG1 and tHMG1 gene cassettes contain their native terminator sequences. ERG20mut-dPT and AAE1 were described earlier.

[0397] All 3 strains outperformed the yCBGA0513 strain in the following modified high throughput screen: Colonies were inoculated into wells of a 96-well deep well plate. Each well contains 400 μl Synthetic Complete Medium (6.7 g/L Yeast Nitrogen Base, 1.6 g/L Amino Acid Drop Out mix without leucine, uracil, tryptophan and histidine, 22 g/L glucose, buffered to pH 6.0, supplemented with leucine, uracil, tryptophan and histidine). These inoculums were grown for 48 hours at 30° C. and shaken at 300 rpm with a 50 mm shaking diameter. After the 48 hours growth period, 40 μl samples of these cultures were inoculated into 360 μl YPD-HXA (10 g/L yeast extract, 20 g/L peptone, 20 g/L glucose and 100 mg/L hexanoic acid) medium. Then samples were grown for 72 hours at 30° C. and shaken at 300 rpm with a 50 mm shaking diameter and 80 μg hexanoic acid dissolved in 8 μl ethanol was added to the samples at two time-points: at 24 and 48 hours. At the end of the 72 hour growth period, the samples were analyzed for cannabinoids. The strains and their final olivetolic acid, olivetol and CBGA titers are listed in Table 6 below:

TABLE 6

| | Olivetolic | | |
|---|---|---|---|
| | acid | Olivetol | CBGA |
| Strain | mg/L | mg/L | mg/L |
| yCBGA0513 | 94 | 185 | 199 |
| yCBGA0520 | 74 | 215 | 313 |
| yCBGA0523 | 56 | 204 | 311 |
| yCBGA0526 | 79 | 215 | 305 |

### Example 16—TKS (OS) Enzyme Evolution

[0398] To improve the performance of TKS, an enzyme evolution experiment was conducted. The wild type amino acid and nucleotide sequences of Saccharomyces cerevisiae TKS are included Table 7 below:

TABLE 7

| | | SEQ |
|---|---|---|
| Description | | ID |
| of sequence | Sequence | NO: |
| WT TKS aa | MNHLRAEGPASVLAIGTANPENILIQDEFPD | 40 |
| | YYFRVTKSEHMTQLKEKFRKICDKSMIRKRN | |
| | CFLNEEHLKQNPRLVEHEMQTLDARQDMLVV | |
| | EVPKLGKDACAKAIKEWGQPKSKITHLIFTS | |
| | ASTTDMPGADYHCAKLLGLSPSVKRVMMYQL | |
| | GCYGGGTVLRIAKDIAENNKGARVLAVCCDI | |
| | MACLFRGPSDSDLELLVGQAIFGDGAAAVIV | |
| | GAEPDESVGERPIFELVSTGQTILPNSEGTI | |
| | GGHIREAGLIFDLHKDVPMLISNNIEKCLIE | |
| | AFTPIGISDWNSIFWITHPGGKAILDKVEEK | |
| | LDLKKEKFVDSRHVLSEHGNMSSSTVLFVMD | |
| | ELRKRSLEEGKSTTGDGFEWGVLFGFGPGLT | |
| | VERVVVRSVPIKY | |
| WT TKS nt | ATGAATCATTTGAGAGCTGAAGGTCCAGCAT | 41 |
| | CAGTTTTGGCTATTGGTACTGCAAACCCAGA | |
| | AAACATCTTGATCCAAGATGAATTTCCAGAT | |
| | TATTACTTCAGAGTTACTAAGTCAGAACATA | |
| | TGACACAATTGAAGGAAAAGTTTAGAAAGAT | |
| | CTGTGATAAGTCTATGATTAGAAAAAGAAAT | |
| | TGTTTCTTGAACGAAGAACATTTGAAGCAAA | |
| | ACCCAAGATTAGTTGAACATGAAATGCAAAC | |
| | ATTGGATGCTAGACAAGATATGTTGGTTGTT | |
| | GAAGTTCCAAAGTTGGGTAAAGATGCATGTG | |
| | CTAAAGCAATTAAAGAATGGGGTCAACCAAA | |
| | GTCTAAGATCACTCATTTGATTTTTACATCA | |
| | GCATCTACTACAGATATGCCAGGTGCTGATT | |
| | ACCATTGTGCAAAGTTGTTGGGTTTGTCACC | |
| | ATCTGTTAAGAGAGTTATGATGTACCAATTA | |
| | GGTTGTTACGGTGGTGGTACTGTTTTGAGAA | |
| | TCGCTAAGGATATCGCAGAAAACAATAAGGG | |
| | TGCTAGAGTCTTGGCAGTTTGTTGTGATATC | |
| | ATGGCTTGTTTGTTTAGAGGTCCATCAGATT | |
| | CTGATTTGGAATTGTTAGTTGGTCAAGCTAT | |
| | TTTTGGTGACGGTGCTGCAGCTGTTATTGTT | |
| | GGTGCAGAACCAGATGAATCAGTTGGTGAAA | |
| | GACCAATCTTCGAATTAGTTTCAACTGGTCA | |
| | AACAATTTTGCCAAATTCTGAAGGTACAATT | |
| | GGTGGTCATATCAGAGAAGCTGGTTTGATCT | |
| | TCGATTTGCATAAAGATGTTCCAATGTTGAT | |
| | CTCTAACAACATCGAAAAGTGTTTGATCGAA | |
| | GCTTTTACTCCAATCGGTATCTCAGATTGGA | |
| | ACTCTATTTTCTGGATTACACATCCAGGTGG | |
| | TAAAGCAATCTTGGATAAGGTTGAAGAAAAA | |
| | TTGGATTTGAAGAAAGAAAAATTTGTTGATT | |
| | CAAGACATGTTTTGTCTGAACATGGTAACAT | |
| | GTCTTCATCTACTGTTTTGTTCGTTATGGAT | |
| | GAATTGAGAAAGAGATCATTAGAAGAGGGTA | |
| | AATCTACTACAGGTGACGGTTTTGAATGGGG | |
| | TGTTTTATTTGGTTTTGGTCCAGGTTTGACA | |
| | GTTGAAAGAGTTGTTGTTAGATCTGTTCCAA | |
| | TTAAATACTAA | |

[0399] Each position in TKS listed in Table 8 below was mutagenized and 20-100 yeast colonies carrying randomly changed amino acids for each marked positions were screened for elevated performance.

TABLE 8

| Position in TKS | Amino acid |
|---|---|
| 48 | Lys |
| 51 | Lys |
| 52 | Ile |
| 55 | Lys |
| 56 | Ser |
| 125 | Ala |
| 126 | Ser |
| 130 | Met |
| 156 | Gly |
| 157 | Cys |
| 185 | Asp |
| 186 | Ile |
| 187 | Met |
| 189 | Cys |
| 190 | Leu |
| 200 | Glu |
| 203 | Val |
| 207 | Ile |
| 208 | Phe |
| 209 | Gly |
| 210 | Asp |
| 248 | Ile |
| 250 | Gly |
| 257 | Leu |
| 259 | Phe |
| 261 | Leu |
| 263 | Lys |
| 264 | Asp |
| 265 | Val |
| 266 | Pro |
| 297 | His |
| 299 | Gly |
| 300 | Gly |
| 301 | Lys |
| 302 | Ala |
| 303 | Ile |
| 330 | Asn |
| 332 | Ser |
| 366 | Gly |
| 367 | Phe |
| 368 | Gly |
| 369 | Pro |
| 370 | Gly |

[0400] The amino acid position A1a125, coding for Alanine in the wild type sequence was found to be able to elevate the TKS activity when the Alanine was swapped for different amino acids. When this amino acid position of TKS contained Serine, the corresponding olivetolic acid production was 50 mg/L in contrast with the 37 mg/L measured in case of the wild type TKS gene.

[0401] The TKS gene was inserted into a plasmid containing the Saccharomyces cerevisiae 2μ replication origin, the URA3 gene as an auxotrophic marker and the TKS gene under the regulation of the GAL10 promoter. The plasmid ID of the control plasmid with wild type TKS sequence was bCBGA1024. The ID of the plasmid with the Alanine to Serine mutation at position 125 is 0827-01-A1-1 (FIG. 6A).

[0402] The yCBGA0368 strain was used for screening these mutant plasmids. yCBGA0368 was constructed by inserting the AAE1 gene under the regulation of the STE5 promoter and the OAC gene under the regulation of the GAL1 promoter into the YKL140W locus by replacing the native YMR145C ORF of the yCBGA0215 strain (FIG. 6B). The yCBGA0215 strain was constructed by deleting the HygMX and KanMX cassettes from the yCBGA0197 strain.

### Example 17—Enhanced CBDA Synthase Secretion

[0403] The secretion of CBDAs was optimized to be able produce large amounts of CBDA in a single process using yeast cells, the wild type sequences for the Saccharomyces cerevisiae CBDA amino acid and nucleotide sequences are included in Table 9:

TABLE 9

| | | SEQ |
|---|---|---|
| Description | | ID |
| of sequence | Sequence | NO: |
| WT CBDA | ATGAAATGTTCTACATTTTCATTTTGGTTTG | 42 |
| synthase nt | TTTGTAAGATCATTTTCTTTTTCTTTTCTTT | |
| | TAATATTCAAACTTCAATCGCTAACCCAAGA | |
| | GAAAATTTCTTGAAGTGTTTCTCTCAATACA | |
| | TTCCAAATAATGCAACAAATTTGAAATTGGT | |
| | TTATACTCAAAATAATCCATTATACATGTCT | |
| | GTTTTAAATTCTACAATTCATAATTTGAGAT | |
| | TTTCTTCAGATACTACACCAAAACCATTGGT | |
| | TATTGTTACACCATCTCATGTTTCACATATC | |
| | CAAGGTACTATCTTGTGTTCTAAGAAAGTTG | |
| | GTTTGCAAATTAGAACTAGATCAGGTGGTCA | |
| | TGATTCAGAAGGCATGTCTTACATCTCACAA | |
| | GTTCCATTCGTTATCGTTGATTTGAGAAACA | |
| | TGAGATCAATTAAAATTGATGTTCATTCACA | |
| | AACAGCTTGGGTTGAAGCTGGTGCAACTTTG | |
| | GGTGAAGTTTACTACTGGGTTAACGAAAAGA | |
| | ATGAATCTTTATCATTGGCTGCTGGTTACTG | |
| | TCCAACAGTTTGTGCTGGTGGTCATTTTGGT | |
| | GGTGGTGGTTATGGTCCATTAATGAGATCCT | |
| | ATGGTTTGGCTGCTGATAACATCATCGATGC | |
| | ACATTTGGTTAACGTTCATGGTAAAGTTTTG | |
| | GATAGAAAGTCTATGGGTGAAGATTTGTTTT | |
| | GGGCTTTGAGAGGTGGTGGTGCTGAATCATT | |
| | TGGTATCATCGTTGCTTGGAAGATCAGATTG | |
| | GTTGCAGTTCCAAAATCTACTATGTTCTCAG | |
| | TTAAGAAAATTATGGAAATCCATGAATTAGT | |
| | TAAATTGGTTAATAAGTGGCAAAATATTGCT | |
| | TATAAATACGATAAAGATTTGTTATTGATGA | |
| | CTCATTTTATTACAAGAAATATTACTGATAA | |
| | CCAAGGTAAAAATAAGACAGCTATCCATACT | |
| | TACTTTTCTTCAGTTTTCTTGGGTGGTGTTG | |
| | ATTCTTTGGTTGATTTGATGAATAAGTCTTT | |
| | TCCAGAATTAGGTATTAAGAAAACTGATTGT | |
| | AGACAATTGTCTTGGATCGATACTATCATTT | |
| | TCTATTCAGGTGTTGTTAACTACGATACAGA | |
| | TAACTTCAATAAGGAAATTTTATTGGATAGA | |
| | TCAGCTGGTCAAAATGGTGCTTTTAAAATTA | |
| | AATTGGATTACGTTAAGAAACCAATTCCAGA | |
| | ATCAGTTTTCGTTCAAATTTTAGAAAAATTG | |
| | TATGAAGAAGATATTGGTGCTGGCATGTACG | |
| | CATTGTATCCATACGGTGGTATCATGGATGA | |
| | AATTTCTGAATCAGCTATTCCATTTCCACAT | |
| | AGAGCAGGTATTTTATACGAATTGTGGTACA | |
| | TTTGTTCTTGGGAAAAGCAAGAAGATAACGA | |
| | AAAACATTTGAACTGGATTAGAAACATCTAT | |
| | AACTTCATGACTCCATACGTTTCACAAAACC | |
| | CAAGATTGGCTTATTTGAACTACAGAGATTT | |
| | GGATATCGGTATTAATGATCCTAAAAATCCA | |
| | AACAACTATACACAAGCAAGAATTTGGGGTG | |
| | AAAAGTACTTCGGTAAAAATTTCGATAGATT | |
| | GGTTAAGGTTAAAACTTTGGTTGATCCAAAT | |
| | AATTTCTTTAGAAATGAACAATCTATTCCAC | |
| | CATTGCCAAGACATAGACATTGA | |
| WT CBDA | MKCSTFSFWFVCKIIFFFFSFNIQTSIANPR | 43 |
| synthase aa | ENFLKCFSQYIPNNATNLKLVYTQNNPLYMS | |
| | VLNSTIHNLRFSSDTTPKPLVIVTPSHVSHI | |
| | QGTILCSKKVGLQIRTRSGGHDSEGMSYISQ | |
| | VPFVIVDLRNMRSIKIDVHSQTAWVEAGATL | |
| | GEVYYWVNEKNESLSLAAGYCPTVCAGGHFG | |
| | GGGYGPLMRSYGLAADNIIDAHLVNVHGKVL | |
| | DRKSMGEDLFWALRGGGAESFGIIVAWKIRL | |
| | VAVPKSTMFSVKKIMEIHELVKLVNKWQNIA | |
| | YKYDKDLLLMTHFITRNITDNQGKNKTAIHT | |
| | YFSSVFLGGVDSLVDLMNKSFPELGIKKTDC | |
| | RQLSWIDTIIFYSGVVNYDTDNFNKEILLDR | |
| | SAGQNGAFKIKLDYVKKPIPESVFVQILEKL | |
| | YEEDIGAGMYALYPYGGIMDEISESAIPFPH | |
| | RAGILYELWYICSWEKQEDNEKHLNWIRNIY | |
| | NFMTPYVSQNPRLAYLNYRDLDIGINDPKNP | |
| | NNYTQARIWGEKYFGKNFDRLVKVKTLVDPN | |
| | NFFRNEQSIPPLPRHRH | |

[0404] A series of plasmids were constructed containing the Saccharomyces cerevisiae replication origin, the URA3 gene as an auxotrophic marker and the CBDA synthase gene under the regulation of the bidirectional GAL1/GAL10 promoter. In each plasmid, the predicted plant secretion signal corresponding to the first 21 amino acid of the CBDA synthase was replaced with different yeast secretion signals, see table below.

[0405] This set of plasmids were separately transformed into yCBGA0314 strains and their CBDA productivity was assayed in a high throughput screening process optimized for CBDA synthase activity. The nucleotide sequences and protein sequence of the tested signal sequences are included in Tables 10-11 below, along with the plasmid IDs, the corresponding amino acid sequences, the ORF names and CBDA titer.

TABLE 10

| Plasmid | | Signal Sequence | SEQ ID | |
|---|---|---|---|---|
| ID | ORF name | Amino Acid Sequence | NO: | Titer |
| bCBGA1827 | OST1_signal-and- | MRQVWFSWIVGLFLCFFNVSSAAPVNTT | 44 | 13 |
| | alpha_only_pro_ | TEDETAQIPAEAVIGYLDLEGDFDVAVL | | |
| | signal-d21_CBDAs | PFSNSTNNGLLFINTTIASIAAKEEGVS | | |
| | | LDKREAEA | | |
| bCBGA1829 | alpha_prepro_ | MRFPSIFTAVLFAASSALAAPVNTTTED | 45 | 7 |
| | signal-d21_CBDAs | ETAQIPAEAVIGYLDLEGDFDVAVLPFS | | |
| | | NSTNNGLLFINTTIASIAAKEEGVSLDK | | |
| | | REAEA | | |
| bCBGA1835 | AMYI_signal- | MQRPFLLAYLVLSLLFNSALG | 46 | 19 |
| | d21_CBDAs | | | |
| bCBGA1836 | BGL2_signal- | MRFSTTLATAATALFFTASQVSA | 47 | 11 |
| | d21_CBDAs | | | |
| bCBGA1837 | OST1_signal- | MRQVWFSWIVGLFLCFFNVSSA | 48 | 41 |
| | d21_CBDAs | | | |
| bCBGA1838 | SUC2_signal- | MLLQAFLFLLAGFAAKISA | 49 | 11 |
| | d21_CBDAs | | | |
| bCBGA1839 | PHO5_signal-and- | MFKSVVYSILAASLANAAPVNTTTEDET | 50 | 44 |
| | alpha_only_pro_ | AQIPAEAVIGYLDLEGDFDVAVLPFSNS | | |
| | signal-d21_CBDAs | TNNGLLFINTTIASIAAKEEGVSLDKRE | | |
| | | AEA | | |
| bCBGA1840 | AGA2_signal-and- | MQLLRCFSIFSVIASVLAAPVNTTTEDE | 51 | 10 |
| | alpha_only_pro_ | TAQIPAEAVIGYLDLEGDFDVAVLPFSN | | |
| | signal-d21_CBDAs | STNNGLLFINTTIASIAAKEEGVSLDKR | | |
| | | EAEA | | |
| bCBGA1842 | AMYI_signal-and- | MQRPFLLAYLVLSLLFNSALGAPVNTTT | 52 | 11 |
| | alpha_only_pro_ | EDETAQIPAEAVIGYLDLEGDFDVAVLP | | |
| | signal-d21_CBDAs | FSNSTNNGLLFINTTIASIAAKEEGVSL | | |
| | | DKREAEA | | |
| bCBGA1843 | BGL2_signal-and- | MRFSTTLATAATALFFTASQVSAAPVNT | 53 | 9 |
| | alpha_only_pro_ | TTEDETAQIPAEAVIGYLDLEGDFDVAV | | |
| | signal-d21_CBDAs | LPFSNSTNNGLLFINTTIASIAAKEEGV | | |
| | | SLDKREAEA | | |
| bCBGA1845 | SUC2_signal-and- | MLLQAFLFLLAGFAAKISAAPVNTTTED | 54 | 9 |
| | alpha_only_pro_ | ETAQIPAEAVIGYLDLEGDFDVAVLPFS | | |
| | signal-d21_CBDAs | NSTNNGLLFINTTIASIAAKEEGVSLDK | | |
| | | REAEA | | |
| bCBGA1846 | HSP150_delta_ | MQYKKTLVASALAATTLAAYAPSEPWST | 55 | 102 |
| | fragment-d21_ | LTPTATYSGGVTDYASTFGIAVQPISTT | | |
| | CBDAs | SSASSAATTASSKAKRAASQIGDGQVQA | | |
| | | ATTTASVSTKSTAAAVSQIGDGQIQATT | | |
| | | KTTAAAVSQIGDGQIQATTKTTSAKTTA | | |
| | | AAVSQISDGQIQATTTTLAPKSTAAAVS | | |
| | | QIGDGQVQATTTTLAPKSTAAAVSQIGD | | |
| | | GQVQATTKTTAAAVSQIGDGQVQATTKT | | |
| | | TAAAVSQIGDGQVQATTKTTAAAVSQIG | | |
| | | DGQVQATTKTTAAAVSQITDGQVQATTK | | |
| | | TTQAASQVSDGQVQATTATSASAAATST | | |
| | | DPVDAVSCKTSGT | | |
| bCBGA1847 | alpha_pre_ | MRFPSIFTAVLFAASSALAAYAPSEPWS | 56 | 94 |
| | signal-and- | TLTPTATYSGGVTDYASTFGIAVQPIST | | |
| | HSP150_delta_ | TSSASSAATTASSKAKRAASQIGDGQVQ | | |
| | fragment_wo_ | AATTTASVSTKSTAAAVSQIGDGQIQAT | | |
| | signal-d21_CBDAs | TKTTAAAVSQIGDGQVQATTKTTSAKTT | | |
| | | AAAVSQISDGQIQATTTTLAPKSTAAAV | | |
| | | SQIGDGQVQATTTTLAPKSTAAAVSQIG | | |
| | | DGQVQATTKTTAAAVSQIGDGQVQATTK | | |
| | | TTAAAVSQIGDGQVQATTKTTAAAVSQI | | |
| | | GDGQVQATTKTTAAAVSQITDGQVQATT | | |
| | | KTTQAASQVSDGQVQATTATSASAAATS | | |
| | | TDPVDAVSCKTSGT | | |
| bCBGA1851 | HSP150 secretion | MQYKKTLVASALAATTLA | 57 | 60 |
| | signal-d21_CBDAs | | | |
| bCBGA1852 | HSP150_delta_ | MQYKKTLVASALAATTLAAYAPSEPWST | 58 | 126 |
| | fragment-and- | LTPTATYSGGVTDYASTFGIAVQPISTT | | |
| | LEKREAEA- | SSASSAATTASSKAKRAASQIGDGQVQA | | |
| | d21_CBDAs | ATTTASVSTKSTAAAVSQIGDGQIQATT | | |
| | | KTTAAAVSQIGDGQIQATTKTTSAKTTA | | |
| | | AAVSQISDGQIQATTTTLAPKSTAAAVS | | |
| | | QIGDGQVQATTTTLAPKSTAAAVSQIGD | | |
| | | GQVQATTKTTAAAVSQIGDGQVQATTKT | | |
| | | TAAAVSQIGDGQVQATTKTTAAAVSQIG | | |
| | | DGQVQATTKTTAAAVSQITDGQVQATTK | | |
| | | TTQAASQVSDGQVQATTATSASAAATST | | |
| | | DPVDAVSCKTSGTLEKREAEA | | |
| bCBGA1860 | YDR055W_N term | MQLHSLIASTALLITSALA | 59 | 12 |
| | 19 AA-d21_CBDAs | | | |
| bCBGA1861 | YGR279C_N term | MRLSNLIASASLLSAATLA | 60 | 44 |
| | 19 AA-d21_CBDAs | | | |
| bCBGA1862 | YGR279C_N term | MRLSNLIASASLLSAATLAAPANHEHKD | 61 | 24 |
| | 31 AA-d21_CBDAs | KRA | | |
| bCBGA1863 | YLR300W_N term | MLSLKTLLCTLLTVSSVLA | 62 | 20 |
| | 19 AA-d21_CBDAs | | | |
| bCBGA1864 | YLR300W_N term | MLSLKTLLCTLLTVSSVLATPVPA | 63 | 54 |
| | 24 AA-d21_CBDAs | | | |
| bCBGA1865 | YLR300W_N term | MLSLKTLLCTLLTVSSVLATPVPARDPS | 64 | 58 |
| | 30 AA-d21_CBDAs | SI | | |
| bCBGA1873 | YAP_TA57- | MKLKTVRSAVLSSLFASQVLGQTTAQTN | 65 | 50 |
| | yEVenus-spacer- | SGGLDVVGLISMAMSKGEELFTGVVPIL | | |
| | d21_CBDAs | VELDGDVNGHKFSVSGEGEGDATYGKLT | | |
| | | LKLICTTGKLPVPWPTLVTTLGYGLQCF | | |
| | | ARYPDHMKQHDFFKSAMPEGYVQERTIF | | |
| | | FKDDGNYKTRAEVKFEGDTLVNRIELKG | | |
| | | IDFKEDGNILGHKLEYNYNSHNVYITAD | | |
| | | KQKNGIKANFKIRHNIEDGGVQLADHYQ | | |
| | | QNTPIGDGPVLLPDNHYLSYQSALSKDP | | |
| | | NEKRDHMVLLEFVTAAGITHGMDELYKE | | |
| | | EGEPK | | |
| bCBGA1874 | YAP_TA57-Kex2- | MKLKTVRSAVLSSLFASQVLGQTTAQTN | 66 | 51 |
| | yEVenus-spacer- | SGGLDVVGLISMAKRKRMSKGEELFTGV | | |
| | d21_CBDAs | VPILVELDGDVNGHKFSVSGEGEGDATY | | |
| | | GKLTLKLICTTGKLPVPWPTLVTTLGYG | | |
| | | LQCFARYPDHMKQHDFFKSAMPEGYVQE | | |
| | | RTIFFKDDGNYKTRAEVKFEGDTLVNRI | | |
| | | ELKGIDFKEDGNILGHKLEYNYNSHNVY | | |
| | | ITADKQKNGIKANFKIRHNIEDGGVQLA | | |
| | | DHYQQNTPIGDGPVLLPDNHYLSYQSAL | | |
| | | SKDPNEKRDHMVLLEFVTAAGITHGMDE | | |
| | | LYKEEGEPK | | |
| bCBGA1877 | YAP_TA57_Kex2_ | MKLKTVRSAVLSSLFASQVLGQTTAQTN | 67 | 49 |
| | spacer.d21_ | SGGLDVVGLISMAKREEGEPK | | |
| | CBDAs_del_KR_ | | | |
| | motif | | | |
| bCBGA1878 | YAP_TA57_Kex2_ | MKLKTVRSAVLSSLFASQVLGQTTAQTN | 68 | 50 |
| | spacer.d21_ | SGGLDVVGLISMAEEGEPK | | |
| | CBDAs_del_KEX2_ | | | |
| | motif | | | |
| bCBGA1882 | MEL1m3 signal- | MRAFLFLTACISLPGVFGVEEGEPK | 69 | 64 |
| | d21_CBDAs | | | |
| bCBGA1884 | INU1A signal- | MKLAYSLLLPLAGVSASVINYKRMAMVS | 70 | 61 |
| | noSpacer- | | | |
| | d21_CBDAs | | | |
| bCBGA1885 | INU1 signal- | MKFAYSLLLPLAGVSASVINYKRMAMVS | 71 | 60 |
| | noSpacer- | | | |
| | d21_CBDAs | | | |
| bCBGA1886 | MEL1m3 signal- | MRAFLFLTACISLPGVFGV | 72 | 25 |
| | noSpacer- | | | |
| | d21_CBDAs | | | |
| bCBGA1887 | N/A | MRAFLFLTACISLPGVFG | 73 | NA |

TABLE 11

| | | SEQ |
|---|---|---|
| Plasmid | Signal Sequence | ID |
| ID | Nucleotide Sequence | NO: |
| bCBGA1827 | ATGAGGCAGGTTTGGTTCTCTTGGATTGTGGGATTGTT | 74 |
| | CCTATGTTTTTTCAACGTGTCTTCTGCTGCTCCAGTCA | |
| | ACACTACAACAGAAGATGAAACGGCACAAATTCCGGC | |
| | TGAAGCTGTCATCGGTTACTTAGATTTAGAAGGGGAT | |
| | TTCGATGTTGCTGTTTTGCCATTTTCCAACAGCACAAA | |
| | TAACGGGTTATTGTTTATAAATACTACTATTGCCAGCA | |
| | TTGCTGCTAAAGAAGAAGGGGTATCTTTGGATAAAAG | |
| | AGAGGCTGAAGCT | |
| bCBGA1829 | ATGAGATTTCCTTCAATTTTTACTGCAGTTTTATTCGC | 75 |
| | AGCATCCTCCGCATTAGCTGCTCCAGTCAACACTACA | |
| | ACAGAAGATGAAACGGCACAAATTCCGGCTGAAGCTG | |
| | TCATCGGTTACTTAGATTTAGAAGGGGATTTCGATGTT | |
| | GCTGTTTTGCCATTTTCCAACAGCACAAATAACGGGTT | |
| | ATTGTTTATAAATACTACTATTGCCAGCATTGCTGCTA | |
| | AAGAAGAAGGGGTATCTTTGGATAAAAGAGAGGCTG | |
| | AAGCT | |
| bCBGA1835 | ATGCAAAGACCATTTCTACTCGCTTATTTGGTCCTTTC | 76 |
| | GCTTCTATTTAACTCAGCTTTGGGT | |
| bCBGA1836 | ATGCGTTTCTCTACTACACTCGCTACTGCAGCTACTGC | 77 |
| | GCTATTTTTCACAGCCTCCCAAGTTTCAGCT | |
| bCBGA1837 | ATGAGGCAGGTTTGGTTCTCTTGGATTGTGGGATTGTT | 78 |
| | CCTATGTTTTTTCAACGTGTCTTCTGCT | |
| bCBGA1838 | ATGCTTTTGCAAGCTTTCCTTTTCCTTTTGGCTGGTTT | 79 |
| | TGCAGCCAAAATATCTGCA | |
| bCBGA1839 | ATGTTTAAATCTGTTGTTTATTCAATTTTAGCCGCTTC | 80 |
| | TTTGGCCAATGCAGCTCCAGTCAACACTACAACAGAAG | |
| | ATGAAACGGCACAAATTCCGGCTGAAGCTGTCATCGG | |
| | TTACTTAGATTTAGAAGGGGATTTCGATGTTGCTGTTT | |
| | TGCCATTTTCCAACAGCACAAATAACGGGTTATTGTTT | |
| | ATAAATACTACTATTGCCAGCATTGCTGCTAAAGAAG | |
| | AAGGGGTATCTTTGGATAAAAGAGAGGCTGAAGCT | |
| bCBGA1840 | ATGCAGTTACTTCGCTGTTTTTCAATATTTTCTGTTAT | 81 |
| | TGCTTCAGTTTTAGCAGCTCCAGTCAACACTACAACAG | |
| | AAGATGAAACGGCACAAATTCCGGCTGAAGCTGTCAT | |
| | CGGTTACTTAGATTTAGAAGGGGATTTCGATGTTGCTG | |
| | TTTTGCCATTTTCCAACAGCACAAATAACGGGTTATTG | |
| | TTTATAAATACTACTATTGCCAGCATTGCTGCTAAAGA | |
| | AGAAGGGGTATCTTTGGATAAAAGAGAGGCTGAAGCT | |
| bCBGA1842 | ATGCAAAGACCATTTCTACTCGCTTATTTGGTCCTTTC | 82 |
| | GCTTCTATTTAACTCAGCTTTGGGTGCTCCAGTCAACA | |
| | CTACAACAGAAGATGAAACGGCACAAATTCCGGCTGA | |
| | AGCTGTCATCGGTTACTTAGATTTAGAAGGGGATTTCG | |
| | ATGTTGCTGTTTTGCCATTTTCCAACAGCACAAATAAC | |
| | GGGTTATTGTTTATAAATACTACTATTGCCAGCATTGC | |
| | TGCTAAAGAAGAAGGGGTATCTTTGGATAAAAGAGAG | |
| | GCTGAAGCT | |
| bCBGA1843 | ATGCGTTTCTCTACTACACTCGCTACTGCAGCTACTGC | 83 |
| | GCTATTTTTCACAGCCTCCCAAGTTTCAGCTGCTCCAG | |
| | TCAACACTACAACAGAAGATGAAACGGCACAAATTCC | |
| | GGCTGAAGCTGTCATCGGTTACTTAGATTTAGAAGGG | |
| | GATTTCGATGTTGCTGTTTTGCCATTTTCCAACAGCAC | |
| | AAATAACGGGTTATTGTTTATAAATACTACTATTGCCA | |
| | GCATTGCTGCTAAAGAAGAAGGGGTATCTTTGGATAA | |
| | AAGAGAGGCTGAAGCT | |
| bCBGA1845 | ATGCTTTTGCAAGCTTTCCTTTTCCTTTTGGCTGGTTT | 84 |
| | TGCAGCCAAAATATCTGCAGCTCCAGTCAACACTACAA | |
| | CAGAAGATGAAACGGCACAAATTCCGGCTGAAGCTGT | |
| | CATCGGTTACTTAGATTTAGAAGGGGATTTCGATGTTG | |
| | CTGTTTTGCCATTTTCCAACAGCACAAATAACGGGTTA | |
| | TTGTTTATAAATACTACTATTGCCAGCATTGCTGCTAA | |
| | AGAAGAAGGGGTATCTTTGGATAAAAGAGAGGCTGA | |
| | AGCT | |
| bCBGA1846 | ATGCAATACAAAAAGACTTTGGTTGCCTCTGCTTTGGC | 85 |
| | CGCTACTACATTGGCCGCCTATGCTCCATCTGAGCCTT | |
| | GGTCCACTTTGACTCCAACAGCCACTTACAGCGGTGG | |
| | TGTTACCGACTACGCTTCCACCTTCGGTATTGCCGTTC | |
| | AACCAATCTCCACTACATCCAGCGCATCATCTGCAGC | |
| | CACCACAGCCTCATCTAAGGCCAAGAGAGCTGCTTCC | |
| | CAAATTGGTGATGGTCAAGTCCAAGCTGCTACCACTA | |
| | CTGCTTCTGTCTCTACCAAGAGTACCGCTGCCGCCGTT | |
| | TCTCAGATCGGTGATGGTCAAATCCAAGCTACTACTA | |
| | AGACTACCGCTGCTGCTGTCTCTCAAATTGGTGATGGT | |
| | CAAATTCAAGCTACCACCAAGACTACCTCTGCTAAGA | |
| | CTACCGCCGCTGCCGTTTCTCAAATCAGTGATGGTCAA | |
| | ATCCAAGCTACCACCACTACTTTAGCCCCAAAGAGCA | |
| | CCGCTGCTGCCGTTTCTCAAATCGGTGATGGTCAAGTT | |
| | CAAGCTACCACCACTACTTTAGCCCCAAAGAGCACCG | |
| | CTGCTGCCGTTTCTCAAATCGGTGATGGTCAAGTTCAA | |
| | GCTACTACTAAGACTACCGCTGCTGCTGTCTCTCAAAT | |
| | TGGTGATGGTCAAGTTCAAGCTACCACCAAGACTACT | |
| | GCTGCCGCCGTTTCTCAAATCGGTGATGGTCAAGTTCA | |
| | AGCTACTACCAAGACTACCGCTGCTGCTGTCTCTCAAA | |
| | TCGGTGATGGTCAAGTTCAAGCAACTACCAAAACCAC | |
| | TGCCGCAGCTGTTTCCCAAATTACTGACGGTCAAGTTC | |
| | AAGCCACTACAAAAACCACTCAAGCAGCCAGCCAAGT | |
| | AAGCGATGGCCAAGTCCAAGCTACTACTGCTACTTCC | |
| | GCTTCTGCAGCCGCTACCTCCACTGACCCAGTCGATGC | |
| | TGTCTCCTGTAAGACTTCTGGTACC | |
| bCBGA1847 | ATGAGATTTCCTTCAATTTTTACTGCAGTTTTATTCGC | 86 |
| | AGCATCCTCCGCATTAGCTGCCTATGCTCCATCTGAGC | |
| | CTTGGTCCACTTTGACTCCAACAGCCACTTACAGCGGT | |
| | GGTGTTACCGACTACGCTTCCACCTTCGGTATTGCCGT | |
| | TCAACCAATCTCCACTACATCCAGCGCATCATCTGCAG | |
| | CCACCACAGCCTCATCTAAGGCCAAGAGAGCTGCTTC | |
| | CCAAATTGGTGATGGTCAAGTCCAAGCTGCTACCACT | |
| | ACTGCTTCTGTCTCTACCAAGAGTACCGCTGCCGCCGT | |
| | TTCTCAGATCGGTGATGGTCAAATCCAAGCTACTACTA | |
| | AGACTACCGCTGCTGCTGTCTCTCAAATTGGTGATGGT | |
| | CAAGTTCAAGCTACCACCAAGACTACCTCTGCTAAGA | |
| | CTACCGCCGCTGCCGTTTCTCAAATCAGTGATGGTCAA | |
| | ATCCAAGCTACCACCACTACTTTAGCCCCAAAGAGCA | |
| | CCGCTGCTGCCGTTTCTCAAATCGGTGATGGTCAAGTT | |
| | CAAGCTACCACCACTACTTTAGCCCCAAAGAGCACCG | |
| | CTGCTGCCGTTTCTCAAATCGGTGATGGTCAAGTCCAA | |
| | GCTACTACTAAGACTACCGCTGCTGCTGTCTCTCAAAT | |
| | TGGTGATGGTCAAGTTCAAGCTACCACCAAGACTACT | |
| | GCTGCCGCCGTTTCTCAAATCGGTGATGGTCAAGTTCA | |
| | AGCTACTACCAAGACTACCGCTGCTGCTGTCTCTCAAA | |
| | TCGGTGATGGTCAAGTTCAAGCAACTACCAAAACCAC | |
| | TGCCGCAGCTGTTTCCCAAATTACTGACGGTCAAGTTC | |
| | AAGCCACTACAAAAACCACTCAAGCAGCCAGCCAAGT | |
| | AAGCGATGGCCAAGTCCAAGCTACTACTGCTACTTCC | |
| | GCTTCTGCAGCCGCTACCTCCACTGACCCAGTCGATGC | |
| | TGTCTCCTGTAAGACTTCTGGTACC | |
| bCBGA1851 | ATGCAATACAAAAAGACTTTGGTTGCCTCTGCTTTGGC | 87 |
| | CGCTACTACATTGGCC | |
| bCBGA1852 | ATGCAATACAAAAAGACTTTGGTTGCCTCTGCTTTGGC | 88 |
| | CGCTACTACATTGGCCGCCTATGCTCCATCTGAGCCTT | |
| | GGTCCACTTTGACTCCAACAGCCACTTACAGCGGTGG | |
| | TGTTACCGACTACGCTTCCACCTTCGGTATTGCCGTTC | |
| | AACCAATCTCCACTACATCCAGCGCATCATCTGCAGC | |
| | CACCACAGCCTCATCTAAGGCCAAGAGAGCTGCTTCC | |
| | CAAATTGGTGATGGTCAAGTCCAAGCTGCTACCACTA | |
| | CTGCTTCTGTCTCTACCAAGAGTACCGCTGCCGCCGTT | |
| | TCTCAGATCGGTGATGGTCAAATCCAAGCTACTACTA | |
| | AGACTACCGCTGCTGCTGTCTCTCAAATTGGTGATGGT | |
| | CAAATTCAAGCTACCACCAAGACTACCTCTGCTAAGA | |
| | CTACCGCCGCTGCCGTTTCTCAAATCAGTGATGGTCAA | |
| | ATCCAAGCTACCACCACTACTTTAGCCCCAAAGAGCA | |
| | CCGCTGCTGCCGTTTCTCAAATCGGTGATGGTCAAGTT | |
| | CAAGCTACCACCACTACTTTAGCCCCAAAGAGCACCG | |
| | CTGCTGCCGTTTCTCAAATCGGTGATGGTCAAGTTCAA | |
| | GCTACTACTAAGACTACCGCTGCTGCTGTCTCTCAAAT | |
| | TGGTGATGGTCAAGTTCAAGCTACCACCAAGACTACT | |
| | GCTGCCGCCGTTTCTCAAATCGGTGATGGTCAAGTTCA | |
| | AGCTACTACCAAGACTACCGCTGCTGCTGTCTCTCAAA | |
| | TCGGTGATGGTCAAGTTCAAGCAACTACCAAAACCAC | |
| | TGCCGCAGCTGTTTCCCAAATTACTGACGGTCAAGTTC | |
| | AAGCCACTACAAAAACCACTCAAGCAGCCAGCCAAGT | |
| | AAGCGATGGCCAAGTCCAAGCTACTACTGCTACTTCC | |
| | GCTTCTGCAGCCGCTACCTCCACTGACCCAGTCGATGC | |
| | TGTCTCCTGTAAGACTTCTGGTACCTTGGAGAAAAGA | |
| | GAGGCTGAAGCA | |
| bCBGA1860 | ATGCAATTACATTCACTTATCGCTTCAACTGCGCTCTT | 89 |
| | AATAACGTCAGCTTTGGCT | |
| bCBGA1861 | ATGCGTCTCTCTAACCTAATTGCTTCTGCCTCTCTTTT | 90 |
| | ATCTGCTGCTACTCTTGCT | |
| bCBGA1862 | ATGCGTCTCTCTAACCTAATTGCTTCTGCCTCTCTTTT | 91 |
| | ATCTGCTGCTACTCTTGCTGCTCCCGCTAACCACGAAC | |
| | ACAAGGACAAGCGTGCT | |
| bCBGA1863 | ATGCTTTCGCTTAAAACGTTACTGTGTACGTTGTTGAC | 92 |
| | TGTGTCATCAGTACTCGCT | |
| bCBGA1864 | ATGCTTTCGCTTAAAACGTTACTGTGTACGTTGTTGAC | 93 |
| | TGTGTCATCAGTACTCGCTACCCCAGTCCCTGCA | |
| bCBGA1865 | ATGCTTTCGCTTAAAACGTTACTGTGTACGTTGTTGAC | 94 |
| | TGTGTCATCAGTACTCGCTACCCCAGTCCCTGCAAGAG | |
| | ACCCTTCTTCCATT | |
| bCBGA1873 | ATGAAACTGAAAACTGTAAGATCTGCGGTCCTTTCGT | 95 |
| | CACTCTTTGCATCGCAGGTTCTCGGTCAAACCACTGCC | |
| | CAGACTAATAGTGGCGGACTTGACGTGGTGGGGTTAA | |
| | TTTCTATGGCGATGTCTAAAGGTGAAGAATTATTCACT | |
| | GGTGTTGTCCCAATTTTGGTTGAATTAGATGGTGATGT | |
| | TAATGGTCACAAATTTTCTGTCTCCGGTGAAGGTGAA | |
| | GGTGATGCTACTTACGGTAAATTGACCTTAAAATTGAT | |
| | TTGTACTACTGGTAAATTGCCAGTTCCATGGCCAACCT | |
| | TAGTCACTACTTTAGGTTATGGTTTGCAATGTTTTGCT | |
| | AGATACCCAGATCATATGAAACAACATGACTTTTTCA | |
| | AGTCTGCCATGCCAGAAGGTTATGTTCAAGAAAGAAC | |
| | TATTTTTTTCAAAGATGACGGTAACTACAAGACCAGA | |
| | GCTGAAGTCAAGTTTGAAGGTGATACCTTAGTTAATA | |
| | GAATCGAATTAAAAGGTATTGATTTTAAAGAAGATGG | |
| | TAACATTTTAGGTCACAAATTGGAATACAACTATAAC | |
| | TCTCACAATGTTTACATCACTGCTGACAAACAAAAGA | |
| | ATGGTATCAAAGCTAACTTCAAAATTAGACACAACAT | |
| | TGAAGATGGTGGTGTTCAATTAGCTGACCATTATCAA | |
| | CAAAATACTCCAATTGGTGATGGTCCAGTCTTGTTACC | |
| | AGACAACCATTACTTATCCTATCAATCTGCCTTATCCA | |
| | AAGATCCAAACGAAAAGAGAGACCACATGGTCTTGTT | |
| | AGAATTTGTTACTGCTGCTGGTATTACCCATGGTATGG | |
| | ATGAATTGTACAAAGAAGAAGGTGAACCAAAA | |
| bCBGA1874 | ATGAAACTGAAAACTGTAAGATCTGCGGTCCTTTCGT | 96 |
| | CACTCTTTGCATCGCAGGTTCTCGGTCAAACCACTGCC | |
| | CAGACTAATAGTGGCGGACTTGACGTGGTGGGGTTAA | |
| | TTTCTATGGCGAAGAGGAAAAGAATGTCTAAAGGTGA | |
| | AGAATTATTCACTGGTGTTGTCCCAATTTTGGTTGAAT | |
| | TAGATGGTGATGTTAATGGTCACAAATTTTCTGTCTCC | |
| | GGTGAAGGTGAAGGTGATGCTACTTACGGTAAATTGA | |
| | CCTTAAAATTGATTTGTACTACTGGTAAATTGCCAGTT | |
| | CCATGGCCAACCTTAGTCACTACTTTAGGTTATGGTTT | |
| | GCAATGTTTTGCTAGATACCCAGATCATATGAAACAA | |
| | CATGACTTTTTCAAGTCTGCCATGCCAGAAGGTTATGT | |
| | TCAAGAAAGAACTATTTTTTTCAAAGATGACGGTAAC | |
| | TACAAGACCAGAGCTGAAGTCAAGTTTGAAGGTGATA | |
| | CCTTAGTTAATAGAATCGAATTAAAAGGTATTGATTTT | |
| | AAAGAAGATGGTAACATTTTAGGTCACAAATTGGAAT | |
| | ACAACTATAACTCTCACAATGTTTACATCACTGCTGAC | |
| | AAACAAAAGAATGGTATCAAAGCTAACTTCAAAATTA | |
| | GACACAACATTGAAGATGGTGGTGTTCAATTAGCTGA | |
| | CCATTATCAACAAAATACTCCAATTGGTGATGGTCCA | |
| | GTCTTGTTACCAGACAACCATTACTTATCCTATCAATC | |
| | TGCCTTATCCAAAGATCCAAACGAAAAGAGAGACCAC | |
| | ATGGTCTTGTTAGAATTTGTTACTGCTGCTGGTATTAC | |
| | CCATGGTATGGATGAATTGTACAAAGAAGAAGGTGAA | |
| | CCAAAA | |
| bCBGA1877 | ATGAAACTGAAAACTGTAAGATCTGCGGTCCTTTCGT | 97 |
| | CACTCTTTGCATCGCAGGTTCTCGGTCAAACCACTGCC | |
| | CAGACTAATAGTGGCGGACTTGACGTGGTGGGGTTAA | |
| | TTTCTATGGCGAAAAGAGAAGAAGGTGAACCAAAA | |
| bCBGA1878 | ATGAAACTGAAAACTGTAAGATCTGCGGTCCTTTCGT | 98 |
| | CACTCTTTGCATCGCAGGTTCTCGGTCAAACCACTGCC | |
| | CAGACTAATAGTGGCGGACTTGACGTGGTGGGGTTAA | |
| | TTTCTATGGCGGAAGAAGGTGAACCAAAA | |
| bCBGA1882 | ATGAGAGCTTTCTTGTTTCTCACCGCATGCATCAGTTT | 99 |
| | GCCAGGCGTTTTTGGGGTGGAAGAAGGTGAACCAAAA | |
| bCBGA1884 | ATGAAGTTAGCATACTCCCTCTTGCTTCCATTGGCAGG | 100 |
| | AGTCAGTGCTTCAGTTATCAATTACAAGAGAATGGCA | |
| | ATGGTATCA | |
| bCBGA1885 | ATGAAGTTCGCATACTCCCTCTTGCTTCCATTGGCAGG | 101 |
| | AGTCAGTGCTTCAGTTATCAATTACAAGAGAATGGCA | |
| | ATGGTATCA | |
| bCBGA1886 | ATGAGAGCTTTCTTGTTTCTCACCGCATGCATCAGTTT | 102 |
| | GCCAGGCGTTTTTGGGGTG | |
| bCBGA1887 | ATGAGAGCTTTCTTGTTTCTCACCGCATGCATCAGTTT | 103 |
| | GCCAGGCGTTTTTGGG | |

[0406] A high throughput screening process of the CBDAs synthase activity was conducted as follows: Colonies were inoculated into wells of a 96-well deep well plate. Each well contained 400 μl SC liquid medium (6.7 g/L Yeast Nitrogen Base, 1.6 g/L Amino Acid Drop Out mix without leucine, uracil, tryptophan and histidine, 22 g/L glucose, buffered to pH 6.0, supplemented with leucine, tryptophan and histidine). These inoculums were grown for 48 hours at 30° C. and shaken at 300 rpm with a 50 mm shaking diameter. After the 48 hours growth period 40 μl samples of these cultures were inoculated into 360 μl YPD-2400LA (10 g/L yeast extract, 20 g/L peptone, 20 g/L glucose and 240 mg/L olivetolic acid) medium. Then samples were grown for 48 hours at 30° C. and shaken at 300 rpm with a 50 mm shaking diameter and 8 μl of 12000 mg/l OLA dissolved in EtOH is added to the samples. Finally, samples were grown for additional 42 hours and are analyzed for cannabinoids. The CBDA titer in the above described screen ranged from 7 to 285 mg/L. For details, see the Table 12 below. (The titers are also included in Table 10 above.)

TABLE 12

| | | CBDA |
|---|---|---|
| plasmid ID | ORF name | (mg/L) |
| bCBGA1829 | alpha_prepro_signal-d21_CBDAs | 7 |
| bCBGA1843 | BGL2_signal-and-alpha_only_pro_signal- | 9 |
| | d21_CBDAs | |
| bCBGA1845 | SUC2_signal-and-alpha_only_pro_signal- | 9 |
| | d21_CBDAs | |
| bCBGA1840 | AGA2_signal-and-alpha_only_pro_signal- | 10 |
| | d21_CBDAs | |
| bCBGA1836 | BGL2_signal-d21_CBDAs | 11 |
| bCBGA1842 | AMYL_signal-and-alpha_only_pro_signal- | 11 |
| | d21_CBDAs | |
| bCBGA1838 | SUC2_signal-d21_CBDAs | 11 |
| bCBGA1860 | YDR055W_Nterm 19 AA-d21_CBDAs | 12 |
| bCBGA1827 | OST1_signal-and-alpha_only_pro_signal- | 13 |
| | d21_CBDAs | |
| bCBGA1835 | AMYI_signal-d21_CBDAs | 19 |
| bCBGA1863 | YLR300W_Nterm 19 AA-d21_CBDAs | 20 |
| bCBGA1862 | YGR279C_Nterm 31 AA-d21_CBDAs | 24 |
| bCBGA1886 | MEL1m3 signal-noSpacer-d21_CBDAs | 25 |
| bCBGA1826 | OST1_signal-d21_CBDAs | 27 |
| bCBGA1837 | OST1_signal-d21_CBDAs | 41 |
| bCBGA1861 | YGR279C_Nterm 19 AA-d21_CBDAs | 44 |
| bCBGA1839 | PHO5_signal-and-alpha_only_pro_signal- | 44 |
| | d21_CBDAs | |
| bCBGA1877 | YAP_TA57_Kex2_spacer.d21_CBDAs_del_KR_motif | 49 |
| bCBGA1873 | YAP_TA57-yEVenus-spacer-d21_CBDAs | 50 |
| bCBGA1878 | YAP_TA57_Kex2_spacer.d21_CBDAs_del_KEX2_motif | 50 |
| bCBGA1874 | YAP_TA57-Kex2-yEVenus-spacer-d21_CBDAs | 51 |
| bCBGA1864 | YLR300W_Nterm 24 AA-d21_CBDAs | 54 |
| bCBGA1865 | YLR300W_Nterm 30 AA-d21_CBDAs | 58 |
| bCBGA1851 | HSP150 secretion signal-d21_CBDAs | 60 |
| bCBGA1885 | INU1 signal-noSpacer-d21_CBDAs | 60 |
| bCBGA1884 | INU1A signal-noSpacer-d21_CBDAs | 61 |
| bCBGA1882 | MEL1m3 signal-d21_CBDAs | 64 |
| bCBGA1847 | alpha_pre_signal-and- | 94 |
| | HSP150_delta_fragment_wo_signal-d21_CBDAs | |
| bCBGA1875 | YAP_TA57_Kex2_spacer-yEVenus-d21_CBDAs | 101 |
| bCBGA1846 | HSP150_delta_fragment-d21_CBDAs | 102 |
| bCBGA1853 | alpha_pre_signal-and- | 114 |
| | HSP150_delta_fragment_wo_signal-and- | |
| | LEKREAEA-d21_CBDAs | |
| RUNM001233_67.1 | YAP_TA57_Kex2_spacer.d21_CBDAs | 124 |
| bCBGA1852 | HSP150_delta_fragment-and-LEKREAEA- | 126 |
| | d21_CBDAs | |
| bCBGA1831 | YAP_TA57_Kex2_spacer-d21_CBDAs | 133 |
| bCBGA1832 | PHO5_signal-d21_CBDAs | 135 |
| bCBGA1850 | PIR3 secretion signal-d21_CBDAs | 138 |
| bCBGA1883 | K28 viral signal-noSpacer-d21_CBDAs | 149 |
| bCBGA1849 | alpha_pre_signal-and- | 151 |
| | PIR3_delta_fragment_wo_singal-d21_CBDAs | |
| bCBGA1880 | INU1A signal-d21_CBDAs | 181 |
| bCBGA1881 | INU1-d21_CBDAs | 188 |
| bCBGA1855 | alpha_pre_signal-and- | 193 |
| | PIR3_delta_fragment_wo_signal-and-LEKREAEA- | |
| | d21_CBDAs | |
| bCBGA1879 | K28 viral signal-d21_CBDAs | 219 |
| bCBGA1848 | PIR3_delta_fragment-d21_CBDAs | 285 |
| bCB GA1854 | PIR3_delta_fragment-and-LEKREAEA-d21_CBDAs | 285 |

[0407] Proteomic analysis using the methods described in Example 4 confirmed that the most active sample had an elevated CBDA synthase concentration in the culture supernatant, most probably due to more effective CBDA synthase secretion. CBDA synthase supernatant concentration was over 15-fold more in strains transformed with the bCBGA1854 plasmid (SEQ ID No: 435), than strains transformed with RUNM001233_67.1. (The corresponding CBDA titers are 285 mg/L and 124 mg/L, respectively.) That is, CBDA productivity and secretion can be increased by improving CBDA synthase secretion.

[0408] The supernatant of the culture transformed with the bCBGA1854 plasmid was mixed with 100 mg/L CBGA, and after 48 hours of incubation, 30 mg/L CBDA was detected, proving that there is active CBDA synthase in the supernatant of the yeast culture.

### Example 18—Enhanced CBDA Synthase Secretion II

[0409] The secretion of CBDAs was further optimized. A second series of plasmids were constructed containing the Saccharomyces cerevisiae 2μ replication origin, the URA3 gene as an auxotrophic marker and the CBDA synthase gene under the regulation of the bidirectional GAL1/GAL10 promoter. The first 21, or in some cases 28, amino acids of the CBDA synthase in each plasmid was replaced with different yeast secretion signals. The secretion signals included various combinations of the K28 viral secretion signal, the N-terminal 233 amino acid of the PIR3 protein, denoted as PIR3 delta fragment (with or without its predicted native secretion signal), a Kex2p cleavage site and a short spacer motif. The nucleotide sequences and protein sequences of the tested signal sequences are included in Tables 13-14 below, along with the plasmid IDs, the corresponding amino acid sequences, the ORF names and CBDA titer.

TABLE 13

| | | Signal Sequence | SEQ ID | |
|---|---|---|---|---|
| Plasmid ID | ORF name | Amino Acid Sequence | NO: | Titer |
| 0253/asn001-1 | K28_signal- | MESVSSLFNIFSTIMVNYKSLVLALLSVS | 104 | 373 |
| | PIR3_delta_ | NLKYARGAYAPKDPWSTLTPSATYKGG | | |
| | fragment_wo_ | ITDYSSSFGIAIEAVATSASSVASSKAKR | | |
| | signal-Spacer- | AASQIGDGQVQAATTTAAVSKKSTAAA | | |
| | d28_CBDAs_ | VSQITDGQVQAAKSTAAAVSQITDGQV | | |
| | Onofri | QAAKSTAAAVSQITDGQVQAAKSTAAA | | |
| | | VSQITDGQVQAAKSTAAAASQISDGQVQ | | |
| | | ATTSTKAAASQITDGQIQASKTTSGASQ | | |
| | | VSDGQVQATAEVKDANDPVDVVSCNN | | |
| | | NS | | |
| 0253/asn005-1 | K28_signal- | MESVSSLFNIFSTIMVNYKSLVLALLSVS | 105 | 377 |
| | PIR3_delta_ | NLKYARGAYAPKDPWSTLTPSATYKGG | | |
| | fragment_wo_ | ITDYSSSFGIAIEAVATSASSVASSKAKR | | |
| | signal- | AASQIGDGQVQAATTTAAVSKKSTAAA | | |
| | LEKREAEA- | VSQITDGQVQAAKSTAAAVSQITDGQV | | |
| | Spacer-d28_ | QAAKSTAAAVSQITDGQVQAAKSTAAA | | |
| | CBDAs_Onofri | VSQITDGQVQAAKSTAAAASQISDGQVQ | | |
| | | ATTSTKAAASQITDGQIQASKTTSGASQ | | |
| | | VSDGQVQATAEVKDANDPVDVVSCNN | | |
| | | NSTLEKREAE | | |
| 0253/asn037-3 | K28_signal- | MESVSSLFNIFSTIMVNYKSLVLALLSVS | 106 | 366 |
| | PIR3_delta_ | NLKYARGAYAPKDPWSTLTPSATYKGG | | |
| | fragment_wo_ | ITDYSSSFGIAIEAVATSASSVASSKAKR | | |
| | signal- | AASQIGDGQVQAATTTAAVSKKSTAAA | | |
| | LEKREAEA- | VSQITDGQVQAAKSTAAAVSQITDGQV | | |
| | d21_CBDAs_ | QAAKSTAAAVSQITDGQVQAAKSTAAA | | |
| | Onofri | VSQITDGQVQAAKSTAAAASQISDGQVQ | | |
| | | ATTSTKAAASQITDGQIQASKTTSGASQ | | |
| | | VSDGQVQATAEVKDANDPVDVVSCNN | | |
| | | NSTLEKREAEA | | |
| 0253/asn049-1 | K28_signal- | MESVSSLFNIFSTIMVNYKSLVLALLSVS | 107 | 374 |
| | PIR3_delta_ | NLKYARGAYAPKDPWSTLTPSATYKGG | | |
| | fragment_wo_ | ITDYSSSFGIAIEAVATSASSVASSKAKR | | |
| | signal- | AASQIGDGQVQAATTTAAVSKKSTAAA | | |
| | Spacer-d21_ | VSQITDGQVQAAKSTAAAVSQITDGQV | | |
| | CBDAs_Onofri | QAAKSTAAAVSQITDGQVQAAKSTAAA | | |
| | | VSQITDGQVQAAKSTAAAASQISDGQVQ | | |
| | | ATTSTKAAASQITDGQIQASKTTSGASQ | | |
| | | VSDGQVQATAEVKDANDPVDVVSCNN | | |
| | | NSTEEGEPK | | |
| 0253/asn052-3 | PIR3_delta_ | MQYKKPLVVSALAATSLAAYAPKDPWS | 108 | 298 |
| | fragment- | TLTPSATYKGGITDYSSSFGIAIEAVATSA | | |
| | Spacer- | SSVASSKAKRAASQIGDGQVQAATTTA | | |
| | d21_CBDAs_ | AVSKKSTAAAVSQITDGQVQAAKSTAA | | |
| | Onofri | AVSQITDGQVQAAKSTAAAVSQITDGQ | | |
| | | VQAAKSTAAAVSQITDGQVQAAKSTAA | | |
| | | AASQISDGQVQATTSTKAAASQITDGQI | | |
| | | QASKTTSGASQVSDGQVQATAEVKDAN | | |
| | | DPVDVVSCNNNSTEEGEPK | | |
| 0253/asn053-2 | K28_signal- | MESVSSLFNIFSTIMVNYKSLVLALLSVS | 109 | 381 |
| | PIR3_delta_ | NLKYARGAYAPKDPWSTLTPSATYKGG | | |
| | fragment_ | ITDYSSSFGIAIEAVATSASSVASSKAKR | | |
| | wo_signal- | AASQIGDGQVQAATTTAAVSKKSTAAA | | |
| | LEKREAEA- | VSQITDGQVQAAKSTAAAVSQITDGQV | | |
| | Spacer- | QAAKSTAAAVSQITDGQVQAAKSTAAA | | |
| | d21_CBDAs_ | VSQITDGQVQAAKSTAAAASQISDGQVQ | | |
| | Onofri | ATTSTKAAASQITDGQIQASKTTSGASQ | | |
| | | VSDGQVQATAEVKDANDPVDVVSCNN | | |
| | | NSTLEKREAEAEEGEPK | | |
| 0253/asn056-1 | PIR3_delta_ | MESVSSLFNIFSTIMVNYKSLVLALLSVS | 110 | 298 |
| | fragment- | NLKYARGAYAPKDPWSTLTPSATYKGG | | |
| | LEKREAEA- | ITDYSSSFGIAIEAVATSASSVASSKAKR | | |
| | Spacer- | AASQIGDGQVQAATTTAAVSKKSTAAA | | |
| | d21_CBDAs_ | VSQITDGQVQAAKSTAAAVSQITDGQV | | |
| | Onofri | QAAKSTAAAVSQITDGQVQAAKSTAAA | | |
| | | VSQITDGQVQAAKSTAAAASQISDGQVQ | | |
| | | ATTSTKAAASQITDGQIQASKTTSGASQ | | |
| | | VSDGQVQATAEVKDANDPVDVVSCNN | | |
| | | NS | | |

TABLE 14

| Plasmid ID | Signal Sequence Nucleotide Sequence | SEQ ID NO: |
|---|---|---|
| 0253/asn001-1 | ATGGAATCTGTTTCTTCTTTGTTCAACATCTTCTCTAC | 111 |
| | TATCATGGTTAACTACAAGTCTTTGGTTTTGGCTTTG | |
| | TTGTCTGTTTCTAACTTGAAGTACGCTAGAGGTGCCT | |
| | ATGCTCCAAAGGACCCGTGGTCCACTTTAACTCCAT | |
| | CAGCTACTTACAAGGGTGGTATAACAGATTACTCTT | |
| | CGAGTTTCGGTATTGCTATTGAAGCCGTGGCTACCA | |
| | GTGCTTCCTCCGTCGCCTCATCTAAAGCAAAGAGAG | |
| | CCGCCTCTCAGATAGGTGATGGTCAAGTACAGGCTG | |
| | CCACTACTACTGCTGCTGTTTCTAAGAAATCCACCGC | |
| | TGCTGCTGTTTCTCAAATAACTGACGGTCAAGTTCAA | |
| | GCTGCTAAGTCTACTGCCGCTGCTGTTTCCCAAATAA | |
| | CTGACGGTCAAGTTCAAGCTGCTAAGTCTACTGCCG | |
| | CTGCCGTTTCTCAAATAACTGACGGTCAAGTTCAAG | |
| | CTGCTAAGTCTACTGCCGCTGCCGTTTCTCAAATAAC | |
| | TGATGGTCAAGTTCAAGCTGCCAAGTCTACTGCTGC | |
| | CGCTGCCTCTCAGATTTCTGACGGCCAAGTTCAGGC | |
| | CACTACCTCTACTAAGGCTGCTGCATCCCAAATTAC | |
| | AGATGGGCAGATACAAGCATCTAAAACTACCAGTGG | |
| | CGCTAGTCAAGTAAGTGATGGCCAAGTCCAGGCTAC | |
| | TGCTGAAGTGAAAGACGCTAACGATCCAGTCGATGT | |
| | TGTTTCCTGTAATAACAATAGT | |
| 0253/asn005-1 | ATGGAATCTGTTTCTTCTTTGTTCAACATCTTCTCTAC | 112 |
| | TATCATGGTTAACTACAAGTCTTTGGTTTTGGCTTTG | |
| | TTGTCTGTTTCTAACTTGAAGTACGCTAGAGGTGCCT | |
| | ATGCTCCAAAGGACCCGTGGTCCACTTTAACTCCAT | |
| | CAGCTACTTACAAGGGTGGTATAACAGATTACTCTT | |
| | CGAGTTTCGGTATTGCTATTGAAGCCGTGGCTACCA | |
| | GTGCTTCCTCCGTCGCCTCATCTAAAGCAAAGAGAG | |
| | CCGCCTCTCAGATAGGTGATGGTCAAGTACAGGCTG | |
| | CCACTACTACTGCTGCTGTTTCTAAGAAATCCACCGC | |
| | TGCTGCTGTTTCTCAAATAACTGACGGTCAAGTTCAA | |
| | GCTGCTAAGTCTACTGCCGCTGCTGTTTCCCAAATAA | |
| | CTGACGGTCAAGTTCAAGCTGCTAAGTCTACTGCCG | |
| | CTGCCGTTTCTCAAATAACTGACGGTCAAGTTCAAG | |
| | CTGCTAAGTCTACTGCCGCTGCCGTTTCTCAAATAAC | |
| | TGATGGTCAAGTTCAAGCTGCCAAGTCTACTGCTGC | |
| | CGCTGCCTCTCAGATTTCTGACGGCCAAGTTCAGGC | |
| | CACTACCTCTACTAAGGCTGCTGCATCCCAAATTAC | |
| | AGATGGGCAGATACAAGCATCTAAAACTACCAGTGG | |
| | CGCTAGTCAAGTAAGTGATGGCCAAGTCCAGGCTAC | |
| | TGCTGAAGTGAAAGACGCTAACGATCCAGTCGATGT | |
| | TGTTTCCTGTAATAACAATAGTACCTTGGAGAAAAG | |
| | AGAGGCTGAA | |
| 0253/asn037-3 | ATGGAATCTGTTTCTTCTTTGTTCAACATCTTCTCTAC | 113 |
| | TATCATGGTTAACTACAAGTCTTTGGTTTTGGCTTTG | |
| | TTGTCTGTTTCTAACTTGAAGTACGCTAGAGGTGCCT | |
| | ATGCTCCAAAGGACCCGTGGTCCACTTTAACTCCAT | |
| | CAGCTACTTACAAGGGTGGTATAACAGATTACTCTT | |
| | CGAGTTTCGGTATTGCTATTGAAGCCGTGGCTACCA | |
| | GTGCTTCCTCCGTCGCCTCATCTAAAGCAAAGAGAG | |
| | CCGCCTCTCAGATAGGTGATGGTCAAGTACAGGCTG | |
| | CCACTACTACTGCTGCTGTTTCTAAGAAATCCACCGC | |
| | TGCTGCTGTTTCTCAAATAACTGACGGTCAAGTTCAA | |
| | GCTGCTAAGTCTACTGCCGCTGCTGTTTCCCAAATAA | |
| | CTGACGGTCAAGTTCAAGCTGCTAAGTCTACTGCCG | |
| | CTGCCGTTTCTCAAATAACTGACGGTCAAGTTCAAG | |
| | CTGCTAAGTCTACTGCCGCTGCCGTTTCTCAAATAAC | |
| | TGATGGTCAAGTTCAAGCTGCCAAGTCTACTGCTGC | |
| | CGCTGCCTCTCAGATTTCTGACGGCCAAGTTCAGGC | |
| | CACTACCTCTACTAAGGCTGCTGCATCCCAAATTAC | |
| | AGATGGGCAGATACAAGCATCTAAAACTACCAGTGG | |
| | CGCTAGTCAAGTAAGTGATGGCCAAGTCCAGGCTAC | |
| | TGCTGAAGTGAAAGACGCTAACGATCCAGTCGATGT | |
| | TGTTTCCTGTAATAACAATAGTACCTTGGAGAAAAG | |
| | AGAGGCTGAAGCA | |
| 0253/asn049-1 | ATGGAATCTGTTTCTTCTTTGTTCAACATCTTCTCTAC | 114 |
| | TATCATGGTTAACTACAAGTCTTTGGTTTTGGCTTTG | |
| | TTGTCTGTTTCTAACTTGAAGTACGCTAGAGGTGCCT | |
| | ATGCTCCAAAGGACCCGTGGTCCACTTTAACTCCAT | |
| | CAGCTACTTACAAGGGTGGTATAACAGATTACTCTT | |
| | CGAGTTTCGGTATTGCTATTGAAGCCGTGGCTACCA | |
| | GTGCTTCCTCCGTCGCCTCATCTAAAGCAAAGAGAG | |
| | CCGCCTCTCAGATAGGTGATGGTCAAGTACAGGCTG | |
| | CCACTACTACTGCTGCTGTTTCTAAGAAATCCACCGC | |
| | TGCTGCTGTTTCTCAAATAACTGACGGTCAAGTTCAA | |
| | GCTGCTAAGTCTACTGCCGCTGCTGTTTCCCAAATAA | |
| | CTGACGGTCAAGTTCAAGCTGCTAAGTCTACTGCCG | |
| | CTGCCGTTTCTCAAATAACTGACGGTCAAGTTCAAG | |
| | CTGCTAAGTCTACTGCCGCTGCCGTTTCTCAAATAAC | |
| | TGATGGTCAAGTTCAAGCTGCCAAGTCTACTGCTGC | |
| | CGCTGCCTCTCAGATTTCTGACGGCCAAGTTCAGGC | |
| | CACTACCTCTACTAAGGCTGCTGCATCCCAAATTAC | |
| | AGATGGGCAGATACAAGCATCTAAAACTACCAGTGG | |
| | CGCTAGTCAAGTAAGTGATGGCCAAGTCCAGGCTAC | |
| | TGCTGAAGTGAAAGACGCTAACGATCCAGTCGATGT | |
| | TGTTTCCTGTAATAACAATAGTACCGAAGAAGGTGA | |
| | ACCAAAA | |
| 0253/asn052-3 | ATGCAATATAAAAAGCCATTAGTCGTCTCCGCTTTA | 115 |
| | GCTGCTACATCTTTAGCTGCCTATGCTCCAAAGGACC | |
| | CGTGGTCCACTTTAACTCCATCAGCTACTTACAAGG | |
| | GTGGTATAACAGATTACTCTTCGAGTTTCGGTATTGC | |
| | TATTGAAGCCGTGGCTACCAGTGCTTCCTCCGTCGCC | |
| | TCATCTAAAGCAAAGAGAGCCGCCTCTCAGATAGGT | |
| | GATGGTCAAGTACAGGCTGCCACTACTACTGCTGCT | |
| | GTTTCTAAGAAATCCACCGCTGCTGCTGTTTCTCAAA | |
| | TAACTGACGGTCAAGTTCAAGCTGCTAAGTCTACTG | |
| | CCGCTGCTGTTTCCCAAATAACTGACGGTCAAGTTC | |
| | AAGCTGCTAAGTCTACTGCCGCTGCCGTTTCTCAAAT | |
| | AACTGACGGTCAAGTTCAAGCTGCTAAGTCTACTGC | |
| | CGCTGCCGTTTCTCAAATAACTGATGGTCAAGTTCA | |
| | AGCTGCCAAGTCTACTGCTGCCGCTGCCTCTCAGATT | |
| | TCTGACGGCCAAGTTCAGGCCACTACCTCTACTAAG | |
| | GCTGCTGCATCCCAAATTACAGATGGGCAGATACAA | |
| | GCATCTAAAACTACCAGTGGCGCTAGTCAAGTAAGT | |
| | GATGGCCAAGTCCAGGCTACTGCTGAAGTGAAAGAC | |
| | GCTAACGATCCAGTCGATGTTGTTTCCTGTAATAACA | |
| | ATAGTACCGAAGAAGGTGAACCAAAA | |
| 0253/asn053-2 | ATGGAATCTGTTTCTTCTTTGTTCAACATCTTCTCTAC | 116 |
| | TATCATGGTTAACTACAAGTCTTTGGTTTTGGCTTTG | |
| | TTGTCTGTTTCTAACTTGAAGTACGCTAGAGGTGCCT | |
| | ATGCTCCAAAGGACCCGTGGTCCACTTTAACTCCAT | |
| | CAGCTACTTACAAGGGTGGTATAACAGATTACTCTT | |
| | CGAGTTTCGGTATTGCTATTGAAGCCGTGGCTACCA | |
| | GTGCTTCCTCCGTCGCCTCATCTAAAGCAAAGAGAG | |
| | CCGCCTCTCAGATAGGTGATGGTCAAGTACAGGCTG | |
| | CCACTACTACTGCTGCTGTTTCTAAGAAATCCACCGC | |
| | TGCTGCTGTTTCTCAAATAACTGACGGTCAAGTTCAA | |
| | GCTGCTAAGTCTACTGCCGCTGCTGTTTCCCAAATAA | |
| | CTGACGGTCAAGTTCAAGCTGCTAAGTCTACTGCCG | |
| | CTGCCGTTTCTCAAATAACTGACGGTCAAGTTCAAG | |
| | CTGCTAAGTCTACTGCCGCTGCCGTTTCTCAAATAAC | |
| | TGATGGTCAAGTTCAAGCTGCCAAGTCTACTGCTGC | |
| | CGCTGCCTCTCAGATTTCTGACGGCCAAGTTCAGGC | |
| | CACTACCTCTACTAAGGCTGCTGCATCCCAAATTAC | |
| | AGATGGGCAGATACAAGCATCTAAAACTACCAGTGG | |
| | CGCTAGTCAAGTAAGTGATGGCCAAGTCCAGGCTAC | |
| | TGCTGAAGTGAAAGACGCTAACGATCCAGTCGATGT | |
| | TGTTTCCTGTAATAACAATAGTACCTTGGAGAAAAG | |
| | AGAGGCTGAAGCAGAAGAAGGTGAACCAAAA | |
| 0253/asn056-1 | ATGCAATATAAAAAGCCATTAGTCGTCTCCGCTTTA | 117 |
| | GCTGCTACATCTTTAGCTGCCTATGCTCCAAAGGACC | |
| | CGTGGTCCACTTTAACTCCATCAGCTACTTACAAGG | |
| | GTGGTATAACAGATTACTCTTCGAGTTTCGGTATTGC | |
| | TATTGAAGCCGTGGCTACCAGTGCTTCCTCCGTCGCC | |
| | TCATCTAAAGCAAAGAGAGCCGCCTCTCAGATAGGT | |
| | GATGGTCAAGTACAGGCTGCCACTACTACTGCTGCT | |
| | GTTTCTAAGAAATCCACCGCTGCTGCTGTTTCTCAAA | |
| | TAACTGACGGTCAAGTTCAAGCTGCTAAGTCTACTG | |
| | CCGCTGCTGTTTCCCAAATAACTGACGGTCAAGTTC | |
| | AAGCTGCTAAGTCTACTGCCGCTGCCGTTTCTCAAAT | |
| | AACTGACGGTCAAGTTCAAGCTGCTAAGTCTACTGC | |
| | CGCTGCCGTTTCTCAAATAACTGATGGTCAAGTTCA | |
| | AGCTGCCAAGTCTACTGCTGCCGCTGCCTCTCAGATT | |
| | TCTGACGGCCAAGTTCAGGCCACTACCTCTACTAAG | |
| | GCTGCTGCATCCCAAATTACAGATGGGCAGATACAA | |
| | GCATCTAAAACTACCAGTGGCGCTAGTCAAGTAAGT | |
| | GATGGCCAAGTCCAGGCTACTGCTGAAGTGAAAGAC | |
| | GCTAACGATCCAGTCGATGTTGTTTCCTGTAATAACA | |
| | ATAGTACCTTGGAGAAAAGAGAGGCTGAAGCAGAA | |
| | GAAGGTGAACCAAAA | |

[0410] This set of plasmids were each individually transformed into the yCBGA0314 strain and their CBDA productivity was assayed in a high throughput screening process optimized for CBDAs synthase activity as described in Example 17 above. The CBDA titer in the above described screen reached up to 381 mg/L. Samples titers for several transformed strains are included in Table 15 below. (The titers are also included in Table 13 above.)

TABLE 15

| | | CBDA |
|---|---|---|
| Plasmid ID | ORF name | (mg/L) |
| 0253/asn053-2 | K28_signal-PIR3_delta_fragment_wo_signal- | 381 |
| | LEKREAEA-Spacer-d2l_CB DAs_Onofri | |
| 0253/asn005-1 | K28_signal-PIR3_delta_fragment_wo_signal- | 377 |
| | LEKREAEA-Spacer-d28_CBDAs_Onofri | |
| 0253/asn049-1 | K28_signal-PIR3_delta_fragment_wo_signal- | 374 |
| | Spacer-d21_CBDAs_Onofri | |
| 0253/asn001-1 | K28_signal-PIR3_delta_fragment_wo_signal- | 373 |
| | Spacer-d28_CBDAs_Onofri | |
| 0253/asn037-3 | K28_signal-PIR3_delta_fragment_wo_signal- | 366 |
| | LEKREAEA-d21_CBDAs_Onofri | |
| 0253/asn052-3 | PIR3_delta_fragment-Spacer- | 298 |
| | d21_CBDAs_Onofri | |
| 0253/asn056-1 | PIR3_delta_fragment-LEKREAEA-Spacer- | 298 |
| | d21_CBDAs_Onofri | |

### Example 19—the yCBGA0508 and yCBGA0509 Strains: VPS10 Deletion

[0411] CBDA productivity was further improved by deletions in the VPS10 gene of the host. Two deletions were made: yCBGA0508 strain was constructed by deleting the whole coding sequence of the VPS locus of the yCBGA0314 strain. yCBGA0509 strain was made by deleting the majority of the 5′ half of the coding sequence of the VPS locus of the yCBGA0314 strain. (FIG. 7).

[0412] The bCBGA1854 plasmid was transformed into the strains yCBGA0314, yCBGA0508 and yCBGA0509 and their CBDA producing capacity was assayed in an improved CBDA screening process.

[0413] Improved high throughput screening process of the CBDAs synthase activity.

[0414] Colonies were inoculated into wells of a 96-well deep well plate. Each well contained 400 μl SC liquid medium (6.7 g/L Yeast Nitrogen Base, 1.6 g/L Amino Acid Drop Out mix without leucine, uracil, tryptophan and histidine, 22 g/L glucose, buffered to pH 6.0, supplemented with leucine, tryptophan and histidine). These inoculums were grown for 48 hours at 30° C. and shaken at 300 rpm with a 50 mm shaking diameter. After the 48 hours growth period 40 μl samples of these cultures were inoculated into 360 μl YPD-pH6-2400LA (10 g/L yeast extract (Ohly), 20 g/L soy peptone (Organotechnie), 20 g/L glucose, buffered to pH6 with sodium phosphate, 240 mg/L olivetolic acid) medium. Then samples were grown for 48 hours at 30° C. and shaken at 300 rpm with a 50 mm shaking diameter and 8 μl of 12000 mg/l OLA dissolved in EtOH is added to the samples. Finally, samples were grown for additional 48 hours and are analyzed for cannabinoids.

[0415] In this screen, the following CBDA titers were detected: see Table 16 below. Both types of deletion in the VPS10 gene had a positive effect on CBDA productivity.

TABLE 16

| Total olivetolic | Parental | | CBDA |
|---|---|---|---|
| acid (mg/L) | strain | Plasmid | titer (mg/L) |
| 480 | yCBGA0314 | bCBGA1854 | 232 |
| 480 | yCBGA0508 | bCBGA1854 | 296 |
| 480 | yCBGA0509 | bCBGA1854 | 286 |

### Example 20—the yCBGA0499 Strain: HXA-to-CBDA Pathway

[0416] CBDA production from a hexanoic acid substrate was tested using the yCBGA0499 strain, which contains the bCBAG1854 plasmid described in Example 19 above.

[0417] For the strain construction the parental strain was the yCBGA0314 strain. The PKS and OAC genes under the regulation of the bidirectional GAL1/GAL10 promoter and the AAE1 gene under the regulation of the STE5 promoter were inserted into the YDR508C, YRL020C and FOX1 loci replacing the native ORFs of the yCBGA0314 strain. The PKS and OAC genes (under the regulation of the bidirectional GAL1/GAL10 promoter) and the AAE1 gene (under the regulation of the STE5 promoter) were inserted into the YDR508C locus. A second copy of the PKS and OAC genes (under the regulation of the sa promoter) and the AAE1 gene (under the regulation of the STE5 promoter) were inserted into the YRL020C locus. A third copy of the PKS and OAC genes (under the regulation of the bidirectional GAL1/GAL10 promoter) and the AAE1 gene (under the regulation of the STE5 promoter) were inserted into the FOX1 locus. A large number of isolates from this transformation were screened and an isolate with high CBGA productivity was identified as yCBGA0499.

[0418] The yCBGA0499 with bCBGA1854 plasmid was assayed for CBDA productivity using the following high throughput screening process using hexanoic acid for CBDA production. Colonies were inoculated into wells of a 96-well deep well plate. Each well contained 400 μl Synthetic Complete liquid medium (6.7 g/L Yeast Nitrogen Base, 1.6 g/L Amino Acid Drop Out mix without leucine, uracil, tryptophan and histidine, 22 g/L glucose, buffered to pH 6.0, supplemented with leucine, tryptophan and histidine). These inoculums were grown for 48 hours at 30° C. and shaken at 300 rpm with a 50 mm shaking diameter. After the 48 hours growth period, 40 μl samples of these cultures were inoculated into 360 μl YPD-pH6-HXA (10 g/L yeast extract (Ohly), 20 g/L soy peptone (Organotechnie), 20 g/L glucose, buffered to pH6 with sodium phosphate, 100 mg/L hexanoic acid) medium. Then samples were grown for 48 hours at 30° C. and shaken at 300 rpm with a 50 mm shaking diameter and 40 μg hexanoic acid dissolved in 8 μl ethanol is added to the samples. Finally, the samples were grown for additional 48 hours and were analyzed for cannabinoids.

[0419] Using this screening method, the yCBGA0499 strain produced 51 mg/L CBDA in one single biological process using hexanoic acid as substrate.

### Example 21—the yCBGA0519 Strain: HXA-to-CBDA Pathway II

[0420] To produce a stable prototrophic strain for CBDA production, the yCBGA0519 strain was constructed by inserting a modified CBDA synthase gene, denoted as PIR3-CBDAs, into the yCBGA0513 strain:

[0421] For the strain construction, the parental strain was the prototrophic CBGA producer yCBGA0513 strain. The gene coding for the PIR3-CBDAs under the regulation of the bidirectional GAL1/GAL10 promoter was integrated into the YKL140W locus by replacing the native YKL140W ORF of the yCBGA0513 strain. The amino acid sequence of PIR3-CBDAs consists of the N-terminal 233 amino acid of the PIR3 protein, the LEKREAEA peptide motif (SEQ ID NO: 118) as a Kex2p cleavage site, and the CBDA synthase coding sequence lacking its first 21 amino acids. The nucleotide sequence of PIR3-CBDAs is SEQ ID NO: 301. The amino acid sequence of PIR3-CBDAs is SEQ ID NO: 302.

[0422] The yCBGA0519 strain was assayed for CBDA productivity using a modified high throughput screening process using hexanoic acid for CBDA production described in Example 20 above. The yCBGA0519 strain produced 144 mg/L CBDA in one single biological process using hexanoic acid as substrate.

### Example 22—Enhanced THCA Synthase Secretion

[0423] The secretion of THCAs was optimized to be able produce large amount of THCA in a single process using yeast cells. The wild type sequences for the Saccharomyces cerevisiae THCA synthase amino acid and nucleotide sequences are included in Table 17:

TABLE 17

| | | SEO |
|---|---|---|
| Description | | ID |
| of sequence | Sequence | NO: |
| WT THCA | ATGAACTGCTCCGCATTCTCTTTCTGGTTCGTCTGTAAAATAA | 119 |
| synthase nt | TCTTCTTCTTCTTGTCCTTCAACATCCAAATCTCCATCGCAAA | |
| | TCCACAAGAAAACTTTTTGAAGTGTTTCTCCGAATACATCCC | |
| | AAACAACCCTGCTAACCCAAAGTTTATATATACTCAACATGA | |
| | TCAATTGTACATGTCCGTTTTGAACAGTACCATCCAAAATTTG | |
| | AGATTCACTTCTGACACTACACCAAAACCTTTAGTCATTGTTA | |
| | CACCTTCCAATGTTAGTCACATTCAAGCTTCTATATTGTGCTC | |
| | TAAGAAAGTAGGTTTGCAAATCAGAACTAGATCAGGTGGTCA | |
| | TGATGCAGAAGGCATGTCTTACATCTCACAAGTTCCATTCGTT | |
| | GTAGTCGATTTGAGAAATATGCATTCCATAAAGATCGACGTT | |
| | CACAGTCAAACAGCATGGGTAGAAGCAGGTGCCACCTTGGG | |
| | TGAAGTTTACTACTGGATCAACGAAAAGAATGAAAACTTTTC | |
| | TTTCCCTGGTGGTTACTGTCCAACAGTAGGTGTCGGTGGTCAC | |
| | TTTTCTGGTGGTGGTTATGGTGCATTGATGAGAAACTACGGTT | |
| | TAGCTGCAGATAATATTATAGACGCCCATTTGGTTAACGTAG | |
| | ATGGTAAAGTTTTGGACAGAAAGTCTATGGGTGAAGATTTGT | |
| | TTTGGGCCATAAGAGGTGGTGGTGGTGAAAATTTCGGTATCA | |
| | TTGCCGCTTGGAAAATTAAGTTAGTCGCTGTTCCTTCCAAAA | |
| | GTACTATTTTCTCTGTCAAAAAGAACATGGAAATCCACGGTT | |
| | TGGTTAAGTTGTTTAATAAGTGGCAAAACATCGCTTACAAGT | |
| | ACGATAAGGACTTGGTTTTGATGACCCATTTCATCACTAAAA | |
| | ATATTACAGATAACCATGGTAAAAATAAGACCACTGTTCACG | |
| | GTTATTTTTCTTCAATTTTCCATGGTGGTGTAGATTCTTTGGTT | |
| | GATTTGATGAATAAGTCATTCCCAGAATTGGGTATTAAAAAG | |
| | ACAGATTGCAAGGAATTTTCTTGGATAGACACAACCATCTTC | |
| | TATTCAGGTGTTGTAAACTTCAACACCGCTAACTTCAAAAAG | |
| | GAAATCTTGTTGGATAGATCCGCTGGTAAAAAGACCGCTTTT | |
| | TCTATTAAATTGGACTACGTTAAGAAACCAATCCCTGAAACT | |
| | GCAATGGTCAAGATATTGGAAAAGTTGTACGAAGAAGATGT | |
| | AGGTGTCGGCATGTACGTTTTGTATCCATACGGTGGTATTATG | |
| | GAAGAAATATCTGAATCAGCCATACCATTTCCTCACAGAGCT | |
| | GGTATCATGTATGAATTATGGTACACAGCCTCATGGGAAAAG | |
| | CAAGAAGATAACGAAAAGCATATCAACTGGGTCAGATCCGT | |
| | TTACAACTTCACTACACCTTACGTTAGTCAAAACCCAAGATT | |
| | GGCATATTTGAACTACAGAGATTTGGACTTAGGTAAAACTAA | |
| | CCCTGAATCTCCAAATAACTATACACAAGCAAGAATTTGGGG | |
| | TGAAAAGTACTTTGGTAAAAATTTCAACAGATTAGTTAAAGT | |
| | AAAGACTAAAGCCGACCCTAACAACTTTTTCAGAAACGAACA | |
| | ATCCATCCCACCTTTGCCACCTCACCACCACTAA | |
| WT THCA | MNCSAFSFWFVCKIIFFFLSFNIQISIANPQENFLKCFSEYIPNNPA | 120 |
| synthase aa | NPKFIYTQHDQLYMSVLNSTIQNLRFTSDTTPKPLVIVTPSNVSHI | |
| | QASILCSKKVGLQIRTRSGGHDAEGMSYISQVPFVVVDLRNMHS | |
| | IKIDVHSQTAWVEAGATLGEVYYWINEKNENFSFPGGYCPTVG | |
| | VGGHFSGGGYGALMRNYGLAADNIIDAHLVNVDGKVLDRKSM | |
| | GEDLFWAIRGGGGENFGIIAAWKIKLVAVPSKSTIFSVKKNMEIH | |
| | GLVKLFNKWQNIAYKYDKDLVLMTHFITKNITDNHGKNKTTVH | |
| | GYFSSIFHGGVDSLVDLMNKSFPELGIKKTDCKEFSWIDTTIFYS | |
| | GVVNFNTANFKKEILLDRSAGKKTAFSIKLDYVKKPIPETAMVK | |
| | ILEKLYEEDVGVGMYVLYPYGGIMEEISESAIPFPHRAGIMYEL | |
| | WYTASWEKQEDNEKHINWVRSVYNFTTPYVSQNPRLAYLNYR | |
| | DLDLGKTNPESPNNYTQARIWGEKYFGKNFNRLVKVKTKADPN | |
| | NFFRNEQSIPPLPPHHH | |

[0424] A series of plasmids were constructed containing the Saccharomyces cerevisiae replication origin, the URA3 gene as an auxotrophic marker and the THCA synthase gene under the regulation of the bidirectional GAL1/GAL10 promoter. In each plasmid various yeast secretion signals were used, in some cases the first 28 amino acids of the THCA synthase protein predicted to be a plant secretion signal was removed. The nucleotide sequences and protein sequences of the tested signal sequences are included in Tables 18-19 below, along with the plasmid IDs, the corresponding amino acid sequences, the ORF names and THCA titer.

TABLE 18

| | | Signal Sequence Amino | SEQ ID | |
|---|---|---|---|---|
| Plasmid ID | ORF name | Acid Sequence | NO: | Titer |
| 0279/asn004-1 | PH05_signal- | MFKSVVYSILAASLANA | 121 | 36 |
| | THCAs | | | |
| 0279/asn006-2 | HSP150_delta_ | MQYKKTLVASALAATTLAAYAPSEPWS | 122 | 13 |
| | fragment-THCAs | TLTPTATYSGGVTDYASTFGIAVQPISTT | | |
| | | SSASSAATTASSKAKRAASQIGDGQVQA | | |
| | | ATTTASVSTKSTAAAVSQIGDGQIQATT | | |
| | | KTTAAAVSQIGDGQIQATTKTTSANTTA | | |
| | | AAVSQISDGQIQATTTTLAPKSTAAAVS | | |
| | | QIGDGQVQATTTTLAPKSTAAAVSQIGD | | |
| | | GQVQATTKTTAAAVSQIGDGQVQATTK | | |
| | | TTAAAVSQIGDGQVQATTKTTAAAVSQI | | |
| | | GDGQVQATTKTTAAAVSQITDGQVQAT | | |
| | | TKTTQAASQVSDGQVQATTATSASAAA | | |
| | | TSTDPVDAVSCKTSGT | | |
| 0279/asn009-3 | PIR3_delta_frag- | MQYKKPLVVSALAATSLAAYAPKDPWS | 123 | 501 |
| | ment-d28_THCAs | TLTPSATYKGGITDYSSSFGIAIEAVATSA | | |
| | | SSVASSKAKRAAYQIGDGQVQAATTTA | | |
| | | AVSKKSTAAAVSQITDGQVQAAKSTAA | | |
| | | AVSQITDGQVQAAKSTAAAVSQITDGQ | | |
| | | VQAAKSTAAAVSQITDGQVQAAKSTAA | | |
| | | AASQISDDQVQATTYTKAAASQITDGQI | | |
| | | QASKTTSGASQVSDGQVQATAEVKDAN | | |
| | | DPVDVVSCNNNST | | |
| 0279/asn010-1 | PIR3_delta_frag- | MQYKKPLVVSALAATSLAAYAPKDPWS | 124 | 4 |
| | ment-THCAs | TLTPSATYKGGITDYSSSFGIAIEAVATSA | | |
| | | SSVASSKAKRAASQIGDGQVQAATTTA | | |
| | | AVSKKSTAAAVSQITDGQVQAAKSTAA | | |
| | | AVSQITDGQVQAAKSTAAAVSQITDGQ | | |
| | | VQAAKSTAAAVSQITDGQVQAAKSTAA | | |
| | | AASQISDGQVQATTSTKAAASQITDGQI | | |
| | | QASKTTSGASQVSDGQVQATAEVKDAN | | |
| | | DPVDVVSCNNNST | | |
| 0279/asn012-3 | alpha_pre_signal- | MRFPSIFTAVLFAASSALAAYAPKDPWS | 125 | 10 |
| | and- | TLTPSATYKGGITDYSSSFGIAIEAVATSA | | |
| | PIR3_delta_frag- | SSVASSKAKRAASQIGDGQVQAATTTA | | |
| | ment_wo_singal- | AVSKKSTAAAVSQITDGQVQAAKSTAA | | |
| | THCAs | AVSQITDGQVQAAKSTAAAVSQITDGQ | | |
| | | VQAAKSTAAAVSQITDGQVQAAKSTAA | | |
| | | AASQISDGQVQATTSTKAAASQITDGQI | | |
| | | QASKTTSGASQVSDGQVQATAEVKDAN | | |
| | | DPVDVVSCNNNST | | |
| 0279/asn014-2 | PIR3 secretion | MQYKKPLVVSALAATSLA | 126 | 122 |
| | signal-THCAs | | | |
| 0279/asn015-2 | HSP150_delta_ | MQYKKTLVASALAATTLAAYAPSEPWS | 127 | 500 |
| | fragment-and- | TLTPTATYSGGVTDYASTFGIAVQQISTT | | |
| | LEKREAEA- | SSASSAATTASSKAKRAASQIGDGQVQA | | |
| | d28_THCAs | ATTTASVSTKSTAAAVSQIGDGQIQATT | | |
| | | KTTAAAVSQIGDGQIQATTKTTSAKTTA | | |
| | | AAVSQISDGQIQATTTTLAPKSTAAAVS | | |
| | | QIGDGQVQATTTTLAPKSTAAAVSQIGD | | |
| | | GQVQATTKTTAAAVSQIGDGQVQATTK | | |
| | | TTAAAVSQIGDGQVQATTKTTAAAVSQI | | |
| | | GDGQVQATTKTTAAAVSQITDGQVQAT | | |
| | | TKTTQAASQVSDGQVQATTATSASAAA | | |
| | | TSTDPVDAVSCKTSGTLEKREAEA | | |
| 0279/asn016-3 | HSP150_delta_ | MQYKKTLVASALAATTLAAYAPSEPWS | 128 | 9 |
| | fragment-and- | TLTPTATYSGGVTDYASTFGIAVQPISTT | | |
| | LEKREAEA- | SSASSAATTASSKAKRAASQIGDGQVQA | | |
| | THCAs | ATTTASVSTKSTAAAVSQIGDGQIQATT | | |
| | | KTTAAAVSQICDGQIQATTKTTSAKTTA | | |
| | | AAVSQISDGQIQATTTTLAPKSTAAAVS | | |
| | | QIGDGQVQATTTTLAPKSTAAAVSQIGD | | |
| | | GQVQATTKTTAAAVSQIGDGQVQATTK | | |
| | | TTAAAVSQIGDGQVQATTKTTAAAVSQI | | |
| | | GDGQVQATTKTTAAAVSQITDGQVQAT | | |
| | | TKTTQAASQVSDGQVQATTATSASAAA | | |
| | | TSTDPVDAVSCKTSGTLEKREAEA | | |
| 0279/asn018-1 | alpha_pre_signal- | MRFPSIFTAVLFAASSALAAYAPSEPWST | 129 | 7 |
| | and- | LTPTATYSGGVTDYASTFGIAVQPISTTS | | |
| | HSP150_delta_frag- | SASSAATTASSKAKRAASQIGDGQVQAA | | |
| | ment_wo_signal- | TTTASVSTKSTAAAVSQIGDGQIQATTK | | |
| | and-LEKREAEA- | TTAAAVSQIGDGQIQATTKTTSAKTTAA | | |
| | THCAs | AVSQISDGQIQATTTTLAPKSTAAAVSQI | | |
| | | GDGQVQATTTTLAPKSTAAAVSQIGDG | | |
| | | QVQATTKTTAAAVSQIGDGQVQATTKT | | |
| | | TAAAVSQIGDGQVQATTKTTAAAVSQIG | | |
| | | DGQVQATTKTTAAAVSQITDGQVQATT | | |
| | | KTTQAASQVSDGQVQATTATSASAAAT | | |
| | | STDPVDAVSCKTSGTLEKREAEA | | |
| 0279/asn019-2 | PIR3_delta_ | MQYKKPLVVSALAATSLAAYAPKDPWS | 130 | 491 |
| | fragment-and- | TLTPSATYKGGITDYSSSFGIAIEAVATSA | | |
| | LEKREAEA- | SSVASSKAKRAASQIGDGQVQAATTTA | | |
| | d28_THCAs | AVSKKSTAAAVSQITDGQVQAAKSTAA | | |
| | | AVSQITDGQVQAAKSTAAAVSQITDGQ | | |
| | | VQAAKSTAAAVSQITDGQVQAAKSTAA | | |
| | | AASQISDGQVQATTSTKAAASQITDGQI | | |
| | | QASKTTSGASQVSDGQVQATAEVKDAN | | |
| | | DPVDVVSCNNNSTLEKREAEA | | |
| 0279/asn020-3 | PIR3_delta_ | MQYKKPLVVSALAATSLAAYAPKDPWS | 131 | 37 |
| | fragment-and- | TLTPSATYKGGITDYSSSFGIAIEAVATSA | | |
| | LEKREAEA- | SSVASSKAKRAASQIGDGQVQAATTTA | | |
| | THCAs | AVSKKSTAAAVSQITDGQVQAAKSTAA | | |
| | | AVSQITDGQVQAAKSTSAAVSQITDGQV | | |
| | | QAAKSTAAAVSQITDGQVQAAKSTAAA | | |
| | | ASQISDGQVQATTSTKAAASQITDGQIQ | | |
| | | ASKTTSGASQVSDGQVQATAEVKDAND | | |
| | | PVDVVSCNNNSTLEKREAEAMNCSAFSF | | |
| | | WFVCKIIFFFLSFNIQISIA | | |
| 0279/asn021-2 | alpha_pre_signal- | MRFPSIFTAVLFAASSALAAYAPKDPWS | 132 | 512 |
| | and- | TLTPSATYKGGITDYSSSFGIAIEAVATSA | | |
| | PIR3_delta_frag- | SSVASSKAKRAASQIGDGQVQAATTTA | | |
| | ment_wo_signal- | AVSKKSTAAAVSQITDGQVQAAKSTAA | | |
| | and-LEKREAEA- | AVSQITDGQVQAAKSTAAAVSQITDGQ | | |
| | d28_THCAs | VQAAKSTAAAVSQITDGQVQAAKSTAA | | |
| | | AASQISDGQVQATTSTKAAASQITDGQI | | |
| | | QASKTTSGASQVSDGQVQATAEVKDAN | | |
| | | DPVDVVSCNNNSTLEKREAEA | | |
| 0279/asn024-3 | YAP_TA57_Kex2 | MKLKTVRSAVLSSLFASQVLGQTTAQT | 133 | 233 |
| | _spacer-yEVenus- | NSGGLDVVGLISMAKRKREEGEPKMSK | | |
| | THCAs | GEELFTGVVPILVELDGDVNGHKFSVSG | | |
| | | EGEGDATYGKLTLKLICTTGKLPVPWPT | | |
| | | LVTTLGYGLQCFARYPDHMKQHDFFKS | | |
| | | AMPEGYVQERTIFFKDDGNYKTRAEVK | | |
| | | FEGDTLVNRIELKGIDFKEDGNILGHKLE | | |
| | | YNYNSHNVYITADKQKNGIKANFKIRHN | | |
| | | IEDGGVQLADHYQQNTPIGDGPVLLPDN | | |
| | | HYLSYQSALSKDPNEKRDHMVLLEFVT | | |
| | | AAGITHGMDELYK | | |
| 0279/asn026-2 | K28 viral signal- | MESVSSLFNIFSTIMVNYKSLVLALLSVS | 134 | 26 |
| | THCAs | NLKYARGEEGEPK | | |
| 0279/asn028-1 | INU1A signal- | MKLAYSLLLPLAGVSASVINYKRMAMV | 135 | 56 |
| | THCAs | SEEGEPK | | |
| 0279/asn030-1 | INU1-THCAs | MKFAYSLLLPLAGVSASVINYKRMAMV | 136 | 58 |
| | | SEEGEPK | | |
| 0279/asn032-2 | K28 viral signal- | MESVSSLFNIFSTIMVNYKSLVLALLSVS | 137 | 111 |
| | noSpacer-THCAs | NLKYARG | | |
| 0279/asn034-4 | YAP_TA57_Kex2 | MKLKTVRSAVLSSLFASQVLGQTTAQT | 138 | 76 |
| | _spacer-THCAs | NSGGLDVVGLISMAKRKREEGEPK | | |

TABLE 19

| | | SEQ |
|---|---|---|
| | | ID |
| Plasmid ID | Signal Sequence Nucleotide Sequence | NO: |
| 0279/asn004-1 | ATGTTTAAATCTGTTGTTTATTCAATTTTAGCCGCTTCTTTGGC | 139 |
| | CAATGCA | |
| 0279/asn006-2 | ATGCAATACAAAAAGACTTTGGTTGCCTCTGCTTTGGCCGCT | 140 |
| | ACTACATTGGCCGCCTATGCTCCATCTGAGCCTTGGTCCACTT | |
| | TGACTCCAACAGCCACTTACAGCGGTGGTGTTACCGACTACG | |
| | CTTCCACCTTCGGTATTGCCGTTCAACCAATCTCCACTACATC | |
| | CAGCGCATCATCTGCAGCCACCACAGCCTCATCTAAGGCCAA | |
| | GAGAGCTGCTTCCCAAATTGGTGATGGTCAAGTCCAAGCTGC | |
| | TACCACTACTGCTTCTGTCTCTACCAAGAGTACCGCTGCCGCC | |
| | GTTTCTCAGATCGGTGATGGTCAAATCCAAGCTACTACTAAG | |
| | ACTACCGCTGCTGCTGTCTCTCAAATTGGTGATGGTCAAATTC | |
| | AAGCTACCACCAAGACTACCTCTGCTAATACTACCGCCGCTG | |
| | CCGTTTCTCAAATCAGTGATGGTCAAATCCAAGCTACCACCA | |
| | CTACTTTAGCCCCAAAGAGCACCGCTGCTGCCGTTTCTCAAA | |
| | TCGGTGATGGTCAAGTTCAAGCTACCACCACTACTTTAGCCC | |
| | CAAAGAGCACCGCTGCTGCCGTTTCTCAAATCGGTGATGGTC | |
| | AAGTTCAAGCTACTACTAAGACTACCGCTGCTGCTGTCTCTC | |
| | AAATTGGTGATGGTCAAGTTCAAGCTACCACCAAGACTACTG | |
| | CTGCCGCCGTTTCTCAAATCGGTGATGGTCAAGTTCAAGCTA | |
| | CTACCAAGACTACCGCTGCTGCTGTCTCTCAAATCGGTGATG | |
| | GTCAAGTTCAAGCAACTACCAAAACCACTGCCGCAGCTGTTT | |
| | CCCAAATTACTGACGGTCAAGTTCAAGCCACTACAAAAACCA | |
| | CTCAAGCAGCCAGCCAAGTAAGCGATGGCCAAGTCCAAGCT | |
| | ACTACTGCTACTTCCGCTTCTGCAGCCGCTACCTCCACTGACC | |
| | CAGTCGATGCTGTCTCCTGTAAGACTTCTGGTACC | |
| 0279/asn009-3 | ATGCAATATAAAAAGCCATTAGTCGTCTCCGCTTTAGCTGCT | 141 |
| | ACATCTTTAGCTGCCTATGCTCCAAAGGACCCGTGGTCCACTT | |
| | TAACTCCATCAGCTACTTACAAGGGTGGTATAACAGATTACT | |
| | CTTCGAGTTTCGGTATTGCTATTGAAGCCGTGGCTACCAGTGC | |
| | TTCCTCCGTCGCCTCATCTAAAGCAAAGAGAGCCGCCTATCA | |
| | GATAGGTGATGGTCAAGTACAGGCTGCCACTACTACTGCTGC | |
| | TGTTTCTAAGAAATCCACCGCTGCTGCTGTTTCTCAAATAACT | |
| | GACGGTCAAGTTCAAGCTGCTAAGTCTACTGCCGCTGCTGTT | |
| | TCCCAAATAACTGACGGTCAAGTTCAAGCTGCTAAGTCTACT | |
| | GCCGCTGCCGTTTCTCAAATAACTGACGGTCAAGTTCAAGCT | |
| | GCTAAGTCTACTGCCGCTGCCGTTTCTCAAATAACTGATGGTC | |
| | AAGTTCAAGCTGCCAAGTCTACTGCTGCCGCTGCCTCTCAGA | |
| | TTTCTGACGACCAAGTTCAGGCCACTACCTATACTAAGGCTG | |
| | CTGCATCCCAAATTACAGATGGGCAGATACAAGCATCTAAAA | |
| | CTACCAGTGGCGCTAGTCAAGTAAGTGATGGCCAAGTCCAGG | |
| | CTACTGCTGAAGTGAAAGACGCTAACGATCCAGTCGATGTTG | |
| | TTTCCTGTAATAACAATAGTACC | |
| 0279/asn010-1 | ATGCAATATAAAAAGCCATTAGTCGTCTCCGCTTTAGCTGCT | 142 |
| | ACATCTTTAGCTGCCTATGCTCCAAAGGACCCGTGGTCCACTT | |
| | TAACTCCATCAGCTACTTACAAGGGTGGTATAACAGATTACT | |
| | CTTCGAGTTTCGGTATTGCTATTGAAGCCGTGGCTACCAGTGC | |
| | TTCCTCCGTCGCCTCATCTAAAGCAAAGAGAGCCGCCTCTCA | |
| | GATAGGTGATGGTCAAGTACAGGCTGCCACTACTACTGCTGC | |
| | TGTTTCTAAGAAATCCACCGCTGCTGCTGTTTCTCAAATAACT | |
| | GACGGTCAAGTTCAAGCTGCTAAGTCTACTGCCGCTGCTGTT | |
| | TCCCAAATAACTGACGGTCAAGTTCAAGCTGCTAAGTCTACT | |
| | GCCGCTGCCGTTTCTCAAATAACTGACGGTCAAGTTCAAGCT | |
| | GCTAAGTCTACTGCCGCTGCCGTTTCTCAAATAACTGATGGTC | |
| | AAGTTCAAGCTGCCAAGTCTACTGCTGCCGCTGCCTCTCAGA | |
| | TTTCTGACGGCCAAGTTCAGGCCACTACCTCTACTAAGGCTG | |
| | CTGCATCCCAAATTACAGATGGGCAGATACAAGCATCTAAAA | |
| | CTACCAGTGGCGCTAGTCAAGTAAGTGATGGCCAAGTCCAGG | |
| | CTACTGCTGAAGTGAAAGACGCTAACGATCCAGTCGATGTTG | |
| | TTTCCTGTAATAACAATAGTACC | |
| 0279/asn012-3 | ATGAGATTTCCTTCAATTTTTACTGCAGTTTTATTCGCAGCAT | 143 |
| | CCTCCGCATTAGCTGCCTATGCTCCAAAGGACCCGTGGTCCA | |
| | CTTTAACTCCATCAGCTACTTACAAGGGTGGTATAACAGATT | |
| | ACTCTTCGAGTTTCGGTATTGCTATTGAAGCCGTGGCTACCAG | |
| | TGCTTCCTCCGTCGCCTCATCTAAAGCAAAGAGAGCCGCCTC | |
| | TCAGATAGGTGATGGTCAAGTACAGGCTGCCACTACTACTGC | |
| | TGCTGTTTCTAAGAAATCCACCGCTGCTGCTGTTTCTCAAATA | |
| | ACTGACGGTCAAGTTCAAGCTGCTAAGTCTACTGCCGCTGCT | |
| | GTTTCCCAAATAACTGACGGTCAAGTTCAAGCTGCTAAGTCT | |
| | ACTGCCGCTGCCGTTTCTCAAATAACTGACGGTCAAGTTCAA | |
| | GCTGCTAAGTCTACTGCCGCTGCCGTTTCTCAAATAACTGATG | |
| | GTCAAGTTCAAGCTGCCAAGTCTACTGCTGCCGCTGCCTCTC | |
| | AGATTTCTGACGGCCAAGTTCAGGCCACTACCTCTACTAAGG | |
| | CTGCTGCATCCCAAATTACAGATGGGCAGATACAAGCATCTA | |
| | AAACTACCAGTGGCGCTAGTCAAGTAAGTGATGGCCAAGTCC | |
| | AGGCTACTGCTGAAGTGAAAGACGCTAACGATCCAGTCGATG | |
| | TTGTTTCCTGTAATAACAATAGTACC | |
| 0279/asn014-2 | ATGCAATATAAAAAGCCATTAGTCGTCTCCGCTTTAGCTGCT | 144 |
| | ACATCTTTAGCT | |
| 0279/asn015-2 | ATGCAATACAAAAAGACTTTGGTTGCCTCTGCTTTGGCCGCT | 145 |
| | ACTACATTGGCCGCCTATGCTCCATCTGAGCCTTGGTCAACTT | |
| | TGACTCCAACAGCCACTTACAGCGGTGGTGTTACCGACTACG | |
| | CTTCCACCTTCGGTATTGCCGTTCAACAAATCTCCACTACATC | |
| | CAGCGCATCATCTGCAGCCACCACAGCCTCATCTAAGGCCAA | |
| | GAGAGCTGCTTCCCAAATTGGTGATGGTCAAGTCCAAGCTGC | |
| | TACCACTACTGCTTCTGTCTCTACCAAGAGTACCGCTGCCGCC | |
| | GTTTCTCAGATCGGTGATGGTCAAATCCAAGCTACTACTAAG | |
| | ACTACCGCTGCTGCTGTCTCTCAAATTGGTGATGGTCAAATTC | |
| | AAGCTACCACCAAGACTACCTCTGCTAAGACTACCGCCGCTG | |
| | CCGTTTCTCAAATCAGTGATGGTCAAATCCAAGCTACCACCA | |
| | CTACTTTAGCCCCAAAGAGCACCGCTGCTGCCGTTTCTCAAA | |
| | TCGGTGATGGTCAAGTTCAAGCTACCACCACTACTTTAGCCC | |
| | CAAAGAGCACCGCTGCTGCCGTTTCTCAAATCGGTGATGGTC | |
| | AAGTTCAAGCTACTACTAAGACTACCGCTGCTGCTGTCTCTC | |
| | AAATTGGTGATGGTCAAGTTCAAGCTACCACCAAGACTACTG | |
| | CTGCCGCCGTTTCTCAAATCGGTGATGGTCAAGTTCAAGCTA | |
| | CTACCAAGACTACCGCTGCTGCTGTCTCTCAAATCGGTGATG | |
| | GTCAAGTTCAAGCAACTACCAAAACCACTGCCGCAGCTGTTT | |
| | CCCAAATTACTGACGGTCAAGTTCAAGCCACTACAAAAACCA | |
| | CTCAAGCAGCCAGCCAAGTAAGCGATGGCCAAGTCCAAGCT | |
| | ACTACTGCTACTTCCGCTTCTGCAGCCGCTACCTCCACTGACC | |
| | CAGTCGATGCTGTCTCCTGTAAGACTTCTGGTACCTTGGAGA | |
| | AAAGAGAGGCTGAAGCA | |
| 0279/asn016-3 | ATGCAATACAAAAAGACTTTGGTTGCCTCTGCTTTGGCCGCT | 146 |
| | ACTACATTGGCCGCCTATGCTCCATCTGAGCCTTGGTCCACTT | |
| | TGACTCCAACAGCCACTTACAGCGGTGGTGTTACCGACTACG | |
| | CTTCCACCTTCGGTATTGCCGTTCAACCAATCTCCACTACATC | |
| | CAGCGCATCATCTGCAGCCACCACAGCCTCATCTAAGGCCAA | |
| | GAGAGCTGCTTCCCAAATTGGTGATGGTCAAGTCCAAGCTGC | |
| | TACCACTACTGCTTCTGTCTCTACCAAGAGTACCGCTGCCGCC | |
| | GTTTCTCAGATCGGTGATGGTCAAATCCAAGCTACTACTAAG | |
| | ACTACCGCTGCTGCTGTCTCTCAAATTTGTGATGGTCAAATTC | |
| | AAGCTACCACCAAGACTACCTCTGCTAAGACTACCGCCGCTG | |
| | CCGTTTCTCAAATCAGTGATGGTCAAATCCAAGCTACCACCA | |
| | CTACTTTAGCCCCAAAGAGCACCGCTGCTGCCGTTTCTCAAA | |
| | TCGGTGATGGTCAAGTTCAAGCTACCACCACTACTTTAGCCC | |
| | CAAAGAGCACCGCTGCTGCCGTTTCTCAAATCGGTGATGGTC | |
| | AAGTTCAAGCTACTACTAAGACTACCGCTGCTGCTGTCTCTC | |
| | AAATTGGTGATGGTCAAGTTCAAGCTACCACCAAGACTACTG | |
| | CTGCCGCCGTTTCTCAAATCGGTGATGGTCAAGTTCAAGCTA | |
| | CTACCAAGACTACCGCTGCTGCTGTCTCTCAAATCGGTGATG | |
| | GTCAAGTTCAAGCAACTACCAAAACCACTGCCGCAGCTGTTT | |
| | CCCAAATTACTGACGGTCAAGTTCAAGCCACTACAAAAACCA | |
| | CTCAAGCAGCCAGCCAAGTAAGCGATGGCCAAGTCCAAGCT | |
| | ACTACTGCTACTTCCGCTTCTGCAGCCGCTACCTCCACTGACC | |
| | CAGTCGATGCTGTCTCCTGTAAGACTTCTGGTACCTTGGAGA | |
| | AAAGAGAGGCTGAAGCA | |
| 0279/asn018-1 | ATGAGATTTCCTTCAATTTTTACTGCAGTTTTATTCGCAGCAT | 147 |
| | CCTCCGCATTAGCTGCCTATGCTCCATCTGAGCCTTGGTCCAC | |
| | TTTGACTCCAACAGCCACTTACAGCGGTGGTGTTACCGACTA | |
| | CGCTTCCACCTTCGGTATTGCCGTTCAACCAATCTCCACTACA | |
| | TCCAGCGCATCATCTGCAGCCACCACAGCCTCATCTAAGGCC | |
| | AAGAGAGCTGCTTCCCAAATTGGTGATGGTCAAGTCCAAGCT | |
| | GCTACCACTACTGCTTCTGTCTCTACCAAGAGTACCGCTGCCG | |
| | CCGTTTCTCAGATCGGTGATGGTCAAATCCAAGCTACTACTA | |
| | AGACTACCGCTGCTGCTGTCTCTCAAATTGGTGATGGTCAAA | |
| | TTCAAGCTACCACCAAGACTACCTCTGCTAAGACTACCGCCG | |
| | CTGCCGTTTCTCAAATCAGTGATGGTCAAATCCAAGCTACCA | |
| | CCACTACTTTAGCCCCAAAGAGCACCGCTGCTGCCGTTTCTC | |
| | AAATCGGTGATGGTCAAGTTCAAGCTACCACCACTACTTTAG | |
| | CCCCAAAGAGCACCGCTGCTGCCGTTTCTCAAATCGGTGATG | |
| | GTCAAGTTCAAGCTACTACTAAGACTACCGCTGCTGCTGTCT | |
| | CTCAAATTGGTGATGGTCAAGTTCAAGCTACCACCAAGACTA | |
| | CTGCTGCCGCCGTTTCTCAAATCGGTGATGGTCAAGTTCAAG | |
| | CTACTACCAAGACTACCGCTGCTGCTGTCTCTCAAATCGGTG | |
| | ATGGTCAAGTTCAAGCAACTACCAAAACCACTGCCGCAGCTG | |
| | TTTCCCAAATTACTGACGGTCAAGTTCAAGCCACTACAAAAA | |
| | CCACTCAAGCAGCCAGCCAAGTAAGCGATGGCCAAGTCCAA | |
| | GCTACTACTGCTACTTCCGCTTCTGCAGCCGCTACCTCCACTG | |
| | ACCCAGTCGATGCTGTCTCCTGTAAGACTTCTGGTACCTTGGA | |
| | GAAAAGAGAGGCTGAAGCA | |
| 0279/asn019-2 | ATGCAATATAAAAAGCCATTAGTCGTCTCCGCTTTAGCTGCT | 148 |
| | ACATCTTTAGCTGCCTATGCTCCAAAGGACCCGTGGTCCACTT | |
| | TAACTCCATCAGCTACTTACAAGGGTGGTATAACAGATTACT | |
| | CTTCGAGTTTCGGTATTGCTATTGAAGCCGTGGCTACCAGTGC | |
| | TTCCTCCGTCGCCTCATCTAAAGCAAAGAGAGCCGCCTCTCA | |
| | GATAGGTGATGGTCAAGTACAGGCTGCCACTACTACTGCTGC | |
| | TGTTTCTAAGAAATCCACCGCTGCTGCTGTTTCTCAAATAACT | |
| | GACGGTCAAGTTCAAGCTGCTAAGTCTACTGCCGCTGCTGTT | |
| | TCCCAAATAACTGACGGTCAAGTTCAAGCTGCTAAGTCTACT | |
| | GCCGCTGCCGTTTCTCAAATAACTGACGGTCAAGTTCAAGCT | |
| | GCTAAGTCTACTGCCGCTGCCGTTTCTCAAATAACTGATGGTC | |
| | AAGTTCAAGCTGCCAAGTCTACTGCTGCCGCTGCCTCTCAGA | |
| | TTTCTGACGGCCAAGTTCAGGCCACTACCTCTACTAAGGCTG | |
| | CTGCATCCCAAATTACAGATGGGCAGATACAAGCATCTAAAA | |
| | CTACCAGTGGCGCTAGTCAAGTAAGTGATGGCCAAGTCCAGG | |
| | CTACTGCTGAAGTGAAAGACGCTAACGATCCAGTCGATGTTG | |
| | TTTCCTGTAATAACAATAGTACCTTGGAGAAAAGAGAGGCTG | |
| | AAGCA | |
| 0279/asn020-3 | ATGCAATATAAAAAGCCATTAGTCGTCTCCGCTTTAGCTGCT | 149 |
| | ACATCTTTAGCTGCCTATGCTCCAAAGGACCCGTGGTCCACTT | |
| | TAACTCCATCAGCTACTTACAAGGGTGGTATAACAGATTACT | |
| | CTTCGAGTTTCGGTATTGCTATTGAAGCCGTGGCTACCAGTGC | |
| | TTCCTCCGTCGCCTCATCTAAAGCAAAGAGAGCCGCCTCTCA | |
| | GATAGGTGATGGTCAAGTACAGGCTGCCACTACTACTGCTGC | |
| | TGTTTCTAAGAAATCCACCGCTGCTGCTGTTTCTCAAATAACT | |
| | GACGGTCAAGTTCAAGCTGCTAAGTCTACTGCCGCTGCTGTT | |
| | TCCCAAATAACTGACGGTCAAGTTCAAGCTGCTAAGTCTACT | |
| | TCCGCTGCCGTTTCTCAAATAACTGACGGTCAAGTTCAAGCT | |
| | GCTAAGTCTACTGCCGCTGCCGTTTCTCAAATAACTGATGGTC | |
| | AAGTTCAAGCTGCCAAGTCTACTGCTGCCGCTGCCTCTCAGA | |
| | TTTCTGACGGCCAAGTTCAGGCCACTACCTCTACTAAGGCTG | |
| | CTGCATCCCAAATTACAGATGGGCAGATACAAGCATCTAAAA | |
| | CTACCAGTGGCGCTAGTCAAGTAAGTGATGGCCAAGTCCAGG | |
| | CTACTGCTGAAGTGAAAGACGCTAACGATCCAGTCGATGTTG | |
| | TTTCCTGTAATAACAATAGTACCTTGGAGAAAAGAGAGGCTG | |
| | AAGCAATGAACTGCTCCGCATTCTCTTTCTGGTTCGTCTGTAA | |
| | AATAATCTTCTTCTTCTTGTCCTTCAACATCCAAATCTCCATC | |
| | GCA | |

[0425] This set of plasmids was transformed into the yCBGA0314 strain and their CBDA productivity was assayed in the following high throughput screening process optimized for the CBDAs synthase activity. Colonies were inoculated into wells of a 96-well deep well plate. Each well contains 400 μl SC liquid medium (6.7 g/L Yeast Nitrogen Base, 1.6 g/L Amino Acid Drop Out mix without leucine, uracil, tryptophan and histidine, 22 g/L glucose, buffered to pH 6.0, supplemented with leucine, tryptophan and histidine). These inoculums were grown for 48 hours at 30° C. and shaken at 300 rpm with a 50 mm shaking diameter. After the 48 hours growth period 40 μl samples of these cultures were inoculated into 360 μl YPD-2400LA (10 g/L yeast extract, 20 g/L peptone, 20 g/L glucose and 240 mg/L olivetolic acid) medium. Then samples were grown for 48 hours at 30° C. and shaken at 300 rpm with a 50 mm shaking diameter and 8 μl of 12000 mg/l OLA dissolved in EtOH is added to the samples. Finally, samples were grown for additional 42 hours and are analyzed for cannabinoids.

[0426] The THCA titer in the above described screen ranged from 4 to 512 mg/L. Sample titers for several transformed strains are included in Table 20 below. (The titers are also included in Table 18 above.)

TABLE 20

| | | THCA |
|---|---|---|
| plasmid ID | ORF name | (mg/L) |
| 0279/asn021- | alpha_pre_signal-and- | 512 |
| 2 | PIR3_delta_fragment_wo_signal-and- | |
| | LEKREAEA-d28_THCAs | |
| 0279/asn009- | PIR3_delta_fragment-d28_THCAs | 501 |
| 3 | | |
| 0279/asn015- | HSP150_delta_fragment-and-LEKREAEA- | 500 |
| 2 | d28_THCAs | |
| 0279/asn011- | alpha_pre_signal-and- | 500 |
| 2 | PIR3_delta_fragment_wo_singal-d28_THCAs | |
| 0279/asn009- | PIR3_delta_fragment-d28_THCAs | 498 |
| 1 | | |
| 0279/asn019- | PIR3_delta_fragment-and-LEKREAEA- | 491 |
| 2 | d28_THCAs | |
| 0279/asn031- | K28 viral signal-noSpacer-d28_THCAs | 485 |
| 4 | | |
| 0279/asn025- | K28 viral signal-d28_THCAs | 479 |
| 3 | | |
| 0279/asn003- | PHO5_signal-d28_THCAs | 473 |
| 2 | | |
| 0279/asn013- | PIR3 secretion signal-d28_THCAs | 459 |
| 1 | | |
| 0279/asn029- | INU1-d28_THCAs | 440 |
| 2 | | |
| 0279/asn027- | INU1A signal-d28_THCAs | 430 |
| 1 | | |
| 0279/asn024- | YAP_TA57_Kex2_spacer-yEVenus-THCAs | 233 |
| 3 | | |
| 0279/asn033- | YAP_TA57_Kex2_spacer-d28_THCAs | 212 |
| 4 | | |
| 0279/asn001- | YAP_TA57_Kex2_spacer-d28_THCAs | 209 |
| 3 | | |
| 0279/asn023- | YAP_TA57_Kex2_spacer-yEVenus-d28_THCAs | 166 |
| 2 | | |
| 0279/asn014- | PIR3 secretion signal-THCAs | 122 |
| 2 | | |
| 0279/asn032- | K28 viral signal-noSpacer-THCAs | 111 |
| 2 | | |
| 0279/asn002- | YAP_TA57_Kex2_spacer-THCAs | 80 |
| 2 | | |
| 0279/asn034- | YAP_TA57_Kex2_spacer-THCAs | 76 |
| 4 | | |
| 0279/asn030- | INU1-THCAs | 58 |
| 1 | | |
| 0279/asn028- | INU1A signal-THCAs | 56 |
| 1 | | |
| 0279/asn020- | PIR3_delta_fragment-and-LEKREAEA-THCAs | 37 |
| 3 | | |
| 0279/asn004- | PHO5_signal-THCAs | 36 |
| 1 | | |
| 0279/asn026- | K28 viral signal-THCAs | 26 |
| 2 | | |
| 0279/asn006- | HSP150_delta_fragment-THCAs | 13 |
| 2 | | |
| 0279/asn012- | alpha_pre_signal-and- | 10 |
| 3 | PIR3_delta_fragment_wo_singal-THCAs | |
| 0279/asn012- | alpha_pre_signal-and- | 10 |
| 1 | PIR3_delta_fragment_wo_singal-THCAs | |
| 0279/asn016- | HSP150_delta_fragment-and-LEKREAEA-THCAs | 9 |
| 3 | | |
| 0279/asn018- | alpha_pre_signal-and- | 7 |
| 1 | HSP150_delta_fragment_wo_signal-and- | |
| | LEKREAEA-THCAs | |
| 0279/asn010- | PIR3_delta_fragment-THCAs | 4 |
| 1 | | |

### Example 23—THCA Synthase Mutagenesis

[0427] One amino acid position was mutagenized in the THCA synthase. The mutant genes were screened in yeast. Clones with increased THCA titer were identified.

[0428] The parental plasmid for the mutagenesis was the RUNM001233_63.1 plasmid, containing the Saccharomyces cerevisiae 2μ replication origin, the URA3 gene as an auxotrophic marker and a modified THCA synthase gene under the regulation of the bidirectional GAL1/GAL10 promoter. The nucleotide sequence of RUNM001233_63.1 is SEQ ID NO: 303. The modified THCA synthase gene contained a chimeric secretion signal and the THCA synthase gene lacking its predicted 28 amino acid long plant secretion signal.

[0429] The mutagenized position is the 469^{th} amino acid position of this modified THCA synthase protein, corresponding to the 446^{th} amino acid position of the unmodified THCA synthase protein. This position contains threonine in the natural THCA synthase. We have constructed large number of plasmids where the above-mentioned codon was randomly mutated allowing the incorporation of codons of any of the 20 amino acids.

[0430] The RUNM001233_63.1 plasmid and large number of its mutagenized variants were transformed into the yCBGA0517 strain and screened for THCA production. For the strain construction the parental strain was the yCBGA0314 strain. The PKS and OAC genes under the regulation of the bidirectional GAL1/GAL10 promoter and the AAE1 gene under the regulation of the STE5 promoter were inserted into the YDR508C, YRL020C and FOX1 loci replacing the native ORFs of the yCBGA0314 strain. A large number of isolates from this transformation was screened and few of them with high CBGA productivity and best reproducibility were identified. One of these isolates was prototrophic for uracil. Next, its URA3 gene was swapped with HIS3 gene resulting in the strain yCBGA0517, prototrophic for histidine and auxotrophic for uracil, leucine and tryptophan.

[0431] Colonies were screened using the following high throughput screening process of the THCA synthase activity: Colonies were inoculated into wells of a 96-well deep well plate. Each well contains 400 μl Synthetic Complete liquid medium (6.7 g/L Yeast Nitrogen Base, 1.6 g/L Amino Acid Drop Out mix without leucine, uracil, tryptophan and histidine, 22 g/L glucose, buffered to pH 6.0, supplemented with leucine, tryptophan and histidine). These inoculums were grown for 48 hours at 30° C. and shaken at 300 rpm with a 50 mm shaking diameter. After the 48 hours growth period 40 μl samples of these cultures are inoculated into 360 μl YPD-2400LA (10 g/L yeast extract, 20 g/L peptone, 20 g/L glucose and 240 mg/L olivetolic acid) medium. Then samples are grown for 48 hours at 30° C. and shaken at 300 rpm with a 50 mm shaking diameter and 8 μl of 12000 mg/l OLA dissolved in EtOH is added to the samples. Finally, samples were grown for additional 42 hours and are analyzed for cannabinoids.

[0432] The plasmid sequence of the best producer clones was determined. In all cases, the plasmids contained mutations only in the region of the mutagenized codon.

[0433] When Alanine, Valine or Isoleucine is coded for in the above-mentioned position of the modified THCA synthase gene, increased THCA titer was observed, as summarized in the Table 21 below:

TABLE 21

| | | | Amino acid | |
|---|---|---|---|---|
| Original | Position in | Position in | present in | THCA |
| amino | unmodified | modified | the marked | titer |
| acid | THCAs | THCAs | position | (mg/L) |
| Threonine | 446 | 469 | Threonine | 289 |
| Threonine | 446 | 469 | Alanine | 477 |
| Threonine | 446 | 469 | Valine | 565 |
| Threonine | 446 | 469 | Isoleucine | 445 |

### Example 24—CBDA Synthase Mutagenesis

[0434] Eighty-four (84) amino acid positions in the native Cannabis sativa CBDA synthase gene were mutagenized. The mutant genes were screened in yeast. Clones were identified with increased CBDA titer.

[0435] The parental plasmid for the mutagenesis was the 0285/asn080-2 plasmid, containing the Saccharomyces cerevisiae 2μ replication origin, the Hygromycin B resistance gene as a dominant marker and one of the modified CBDA synthase genes disclosed in this example under the regulation of the bidirectional GAL1/GAL10 promoter. The modified CBDA synthase gene contained the PIR3 delta fragment as secretion signal and the CBDA synthase gene lacking its predicted 21 amino acid long plant secretion signal. The modified CBDA coding sequences used for the 0285/asn080-2 parental plasmid are included in Table 22 below.

TABLE 22

| | |
|---|---|
| CBDAs | ATGCAATATAAAAAGCCATTAGTCGTCTCCGCTTTAGCTGCTACATCTTT |
| DNA | AGCTGCCTATGCTCCAAAGGACCCGTGGTCCACTTTAACTCCATCAGCTA |
| sequence | CTTACAAGGGTGGTATAACAGATTACTCTTCGAGTTTCGGTATTGCTATT |
| including | GAAGCCGTGGCTACCAGTGCTTCCTCCGTCGCCTCATCTAAAGCAAAGA |
| the signal | GAGCCGCCTCTCAGATAGGTGATGGTCAAGTACAGGCTGCCACTACTAC |
| sequence | TGCTGCTGTTTCTAAGAAATCCACCGCTGCTGCTGTTTCTCAAATAACTG |
| | ACGGTCAAGTTCAAGCTGCTAAGTCTACTGCCGCTGCTGTTTCCCAAATA |
| | ACTGACGGTCAAGTTCAAGCTGCTAAGTCTACTGCCGCTGCCGTTTCTCA |
| | AATAACTGACGGTCAAGTTCAAGCTGCTAAGTCTACTGCCGCTGCCGTTT |
| | CTCAAATAACTGATGGTCAAGTTCAAGCTGCCAAGTCTACTGCTGCCGC |
| | TGCCTCTCAGATTTCTGACGGCCAAGTTCAGGCCACTACCTCTACTAAGG |
| | CTGCTGCATCCCAAATTACAGATGGGCAGATACAAGCATCTAAAACTAC |
| | CAGTGGCGCTAGTCAAGTAAGTGATGGCCAAGTCCAGGCTACTGCTGAA |
| | GTGAAAGACGCTAACGATCCAGTCGATGTTGTTTCCTGTAATAACAATA |
| | GTACCAATATTCAAACTTCAATCGCTAACCCAAGAGAAAATTTCTTGAA |
| | GTGTTTCTCTCAATACATTCCAAATAATGCAACAAATTTGAAATTGGTTT |
| | ATACTCAAAATAATCCATTATACATGTCTGTTTTAAATTCTACAATTCAT |
| | AATTTGAGATTTTCTTCAGATACTACACCAAAACCATTGGTTATTGTTAC |
| | ACCATCTCATGTTTCACATATCCAAGGTACTATCTTGTGTTCTAAGAAAG |
| | TTGGTTTGCAAATTAGAACTAGATCAGGTGGTCATGATTCAGAAGGCAT |
| | GTCTTACATCTCACAAGTTCCATTCGTTATCGTTGATTTGAGAAACATGA |
| | GATCAATTAAAATTGATGTTCATTCACAAACAGCTTGGGTTGAAGCTGG |
| | TGCAACTTTGGGTGAAGTTTACTACTGGGTTAACGAAAAGAATGAATCT |
| | TTATCATTGGCTGCTGGTTACTGTCCAACAGTTTGTGCTGGTGGTCATTT |
| | TGGTGGTGGTGGTTATGGTCCATTAATGAGATCCTATGGTTTGGCTGCTG |
| | ATAACATCATCGATGCACATTTGGTTAACGTTCATGGTAAAGTTTTGGAT |
| | AGAAAGTCTATGGGTGAAGATTTGTTTTGGGCTTTGAGAGGTGGTGGTG |
| | CTGAATCATTTGGTATCATCGTTGCTTGGAAGATCAGATTGGTTGCAGTT |
| | CCAAAATCTACTATGTTCTCAGTTAAGAAAATTATGGAAATCCATGAAT |
| | TAGTTAAATTGGTTAATAAGTGGCAAAATATTGCTTATAAATACGATAA |
| | AGATTTGTTATTGATGACTCATTTTATTACAAGAAATATTACTGATAACC |
| | AAGGTAAAAATAAGACAGCTATCCATACTTACTTTTCTTCAGTTTTCTTG |
| | GGTGGTGTTGATTCTTTGGTTGATTTGATGAATAAGTCTTTTCCAGAATT |
| | AGGTATTAAGAAAACTGATTGTAGACAATTGTCTTGGATCGATACTATC |
| | ATTTTCTATTCAGGTGTTGTTAACTACGATACAGATAACTTCAATAAGGA |
| | AATTTTATTGGATAGATCAGCTGGTCAAAATGGTGCTTTTAAAATTAAAT |
| | TGGATTACGTTAAGAAACCAATTCCAGAATCAGTTTTCGTTCAAATTTTA |
| | GAAAAATTGTATGAAGAAGATATTGGTGCTGGCATGTACGCATTGTATC |
| | CATACGGTGGTATCATGGATGAAATTTCTGAATCAGCTATTCCATTTCCA |
| | CATAGAGCAGGTATTTTATACGAATTGTGGTACATTTGTTCTTGGGAAAA |
| | GCAAGAAGATAACGAAAAACATTTGAACTGGATTAGAAACATCTATAA |
| | CTTCATGACTCCATACGTTTCACAAAACCCAAGATTGGCTTATTTGAACT |
| | ACAGAGATTTGGATATCGGTATTAATGATCCTAAAAATCCAAACAACTA |
| | TACACAAGCAAGAATTTGGGGTGAAAAGTACTTCGGTAAAAATTTCGAT |
| | AGATTGGTTAAGGTTAAAACTTTGGTTGATCCAAATAATTTCTTTAGAAA |
| | TGAACAATCTATTCCACCATTGCCAAGACATAGACATTGA |
| | (SEQ ID NO: 150) |
| CBDAs | MQYKKPLVVSALAATSLAAYAPKDPWSTLTPSATYKGGITDYSSSFGIAIEA |
| amino | VATSASSVASSKAKRAASQIGDGQVQAATTTAAVSKKSTAAAVSQITDGQV |
| acid | QAAKSTAAAVSQITDGQVQAAKSTAAAVSQITDGQVQAAKSTAAAVSQIT |
| sequence | DGQVQAAKSTAAAASQISDGQVQATTSTKAAASQITDGQIQASKTTSGASQ |
| including | VSDGQVQATAEVKDANDPVDVVSCNNNSTNIQTSIANPRENFLKCFSQYIP |
| the signal | NNATNLKLVYTQNNPLYMSVLNSTIHNLRFSSDTTPKPLVIVTPSHVSHIQG |
| sequence | TILCSKKVGLQIRTRSGGHDSEGMSYISQVPFVIVDLRNMRSIKIDVHSQTA |
| | WVEAGATLGEVYYWVNEKNESLSLAAGYCPTVCAGGHFGGGGYGPLMRS |
| | YGLAADNIIDAHLVNVHGKVLDRKSMGEDLFWALRGGGAESFGIIVAWKI |
| | RLVAVPKSTMFSVKKIMEIHELVKLVNKWQNIAYKYDKDLLLMTHFITRNI |
| | TDNQGKNKTAIHTYFSSVFLGGVDSLVDLMNKSFPELGIKKTDCRQLSWID |
| | TIIFYSGVVNYDTDNFNKEILLDRSAGQNGAFKIKLDYVKKPIPESVFVQILE |
| | KLYEEDIGAGMYALYPYGGIMDEISESAIPFPHRAGILYELWYICSWEKQED |
| | NEKHLNWIRNIYNFMTPYVSQNPRLAYLNYRDLDIGINDPKNPNNYTQARI |
| | WGEKYFGKNFDRLVKVKTLVDPNNFFRNEQSIPPLPRHRH |
| | (SEQ ID NO: 151) |
| CBDAs | NIQTSIANPRENFLKCFSQYIPNNATNLKLVYTQNNPLYMSVLNSTIHNLRFS |
| amino | SDTTPKPLVIVTPSHVSHIQGTILCSKKVGLQIRTRSGGHDSEGMSYISQVPF |
| acid | VIVDLRNMRSIKIDVHSQTAWVEAGATLGEVYYWVNEKNESLSLAAGYCP |
| sequence | TVCAGGHFGGGGYGPLMRSYGLAADNIIDAHLVNVHGKVLDRKSMGEDL |
| without | FWALRGGGAESFGIIVAWKIRLVAVPKSTMFSVKKIMEIHELVKLVNKWQN |
| the signal | IAYKYDKDLLLMTHFITRNITDNQGKNKTAIHTYFSSVFLGGVDSLVDLMN |
| sequence | KSFPELGIKKTDCRQLSWIDTIIFYSGVVNYDTDNFNKEILLDRSAGQNGAF |
| | KIKLDYVKKPIPESVFVQILEKLYEEDIGAGMYALYPYGGIMDEISESAIPFPH |
| | RAGILYELWYICSWEKQEDNEKHLNWIRNIYNFMTPYVSQNPRLAYLNYR |
| | DLDIGINDPKNPNNYTQARIWGEKYFGKNFDRLVKVKTLVDPNNFFRNEQS |
| | IPPLPRHRH |
| | (SEQ ID NO: 152) |

[0436] The eighty-four (84) amino acid positions encoded by the wild-type CBDA synthase gene were selected for mutagenesis based on the fact that they contained amino acid differences with THCA synthase when aligned sequentially. The wild-type CBDA synthase specific amino acid was replaced at each of these positions for the corresponding amino acid found in the THCA synthase protein. 0285/asn080-2 plasmids containing the mutants were transformed into the yCBGA0513 strain and screened for CBDA production.

[0437] Several double combinations of these mutations were also introduced into the 0285/asn080-2 plasmid, and along with their corresponding single mutant plasmid counterparts, were transformed into the yCBGA0523 strain and screened for CBDA production.

[0438] The CBDA mutant (and wild type) coding sequences used for the 0285/asn080-2 parental plasmid are included in Table 22 in Example 24.

[0439] CBDA synthase activity in the strains was screened using the following high throughput screening process. Colonies were inoculated into wells of a 96-well deep well plate. Each well contained 400 μl SC liquid medium (6.7 g/L Yeast Nitrogen Base, 1.6 g/L Amino Acid Drop Out mix without leucine, uracil, tryptophan and histidine, 22 g/L glucose, buffered to pH 6.0, supplemented with leucine, tryptophan, histidine and Hygromycin B). These inoculums were grown for 48 hours at 30° C. and shaken at 300 rpm with 50 mm shaking diameter. After a 48 hour growth period, 40 μl samples of these cultures were inoculated into 360 μl YPD-2400LA (10 g/L yeast extract, 20 g/L peptone, 20 g/L glucose and 240 mg/L olivetolic acid) medium. Then samples were grown for 48 hours at 30° C. and shaken at 300 rpm with 50 mm shaking diameter and 8 μl of 12000 mg/l OLA dissolved in EtOH is added to the samples. Finally, samples were grown for additional 42 hours and were analyzed for cannabinoids.

[0440] The CBDA titer in the above described screen ranged from 10.5 to 408.6 mg/L. Sample titers for the transformed strains, along with each strain's respective amino acid mutations and amino acid sequences, are included in Tables 23-26 below. (All mutation sites refer to the mutation site on wild-type CBDA's coding sequence without the wild-type signal sequence.)

TABLE 23
yCBGA_0513 mutant strains

| | mutation site | | | |
|---|---|---|---|---|
| | on CBDAs | | | |
| | coding | | | |
| | sequence | | | Average |
| | without the | native | new | titer |
| | signal | amino | amino | of CBDA |
| Constructs | sequence | acid | acid | mg/L |
| PIR3_CBDAs_S449N | 216 | S | N | 408.6 |
| PIR3_CBDAs_G307A | 74 | G | A | 407 |
| PIR3_CBDAs_H425D | 192 | H | D | 381.1 |
| PIR3_CBDAs_P464PS | 231 | P | PS | 378.7 |
| PIR3_CBDAs_N269D | 36 | N | D | 376.9 |
| PIR3_CBDAs_V454A | 221 | V | A | 376.6 |
| PIR3_CBDAs_M468I | 235 | M | I | 367.5 |
| PIR3_CBDAs_I700L | 467 | I | L | 357 |
| PIR3_CBDAs_Y571F | 338 | Y | F | 352 |
| PIR3_CBDAs_L442I | 209 | L | I | 350.9 |
| PIR3_CBDAs_S328A | 95 | S | A | 343.8 |
| PIR3_CBDAs_I620V | 387 | I | V | 341.6 |
| PIR3_CBDAs_I676V | 443 | I | V | 340.3 |
| PIR3_CBDA5_Q252E | 19 | Q | E | 325.6 |
| PIR3_CBDAs_C392G | 159 | C | G | 323.9 |
| PIR3_CBDAs_R459K | 226 | R | K | 320.8 |
| PIR3_CBDAs_I341V | 108 | I | V | 319.6 |
| PIR3_CBDAs_A626V | 393 | A | V | 319.2 |
| PIR3_CBDAs_L261P | 28 | L | P | 318.2 |
| PIR3_CBDAs_G590T | 357 | G | T | 317.5 |
| PIR3_CBDAs_C658A | 425 | C | A | 310.5 |
| PIR3_CBDAs_V264I | 31 | V | I | 310.3 |
| PIR3_CBDAs_A622V | 389 | A | V | 309.2 |
| PIR3_CBDAs_N675S | 442 | N | S | 308.7 |
| PIR3_CBDAs_R243Q | 10 | R | Q | 306.3 |
| PIR3_CBDAs_L651M | 418 | L | M | 303 |
| PIR3_CBDAs_H281Q | 48 | H | Q | 301 |
| PIR3_CBDAs_R554K | 321 | R | K | 299 |
| PIR3_CBDAs_K706E | 473 | K | E | 297.7 |
| PIR3_CBDAs_Q555E | 322 | Q | E | 294.3 |
| PIR3_CBDAs_R755H | 522 | R | H | 294.2 |
| PIR3_CBDAs_R753P | 520 | R | P | 292.5 |
| PIR3_CBDAs_V736A | 503 | V | A | 290.7 |
| PIR3_CBDAs_A393V | 160 | A | V | 285.6 |
| PIR3_CBDAs_S286T | 53 | S | T | 285.5 |
| PIR3_CBDAs_D572N | 339 | D | N | 285.4 |
| wild type control | wild type | N/A | N/A | 283.7 |
| construct | | | | |
| PIR3_CBDAs_Q610K | 377 | Q | K | 277.8 |
| PIR3_CBDAs_G398S | 165 | G | S | 276.9 |
| PIR3_CBDAs_L499V | 266 | L | V | 274.1 |
| PIR3_CBDAs_Q513H | 280 | Q | H | 274 |
| PIR3_CBDAs_D574A | 341 | D | A | 270.7 |
| PIR3_CBDAs_L735K | 502 | L | K | 269.3 |
| PIR3_CBDAs_N577K | 344 | N | K | 265.7 |
| PIR3_CBDAs_Q588K | 355 | Q | K | 264.1 |
| PIR3_CBDAs_L383F | 150 | L | F | 261.3 |
| PIR3_CBDAs_T259A | 26 | T | A | 260 |
| PIR3_CBDAs_D635E | 402 | D | E | 256.4 |
| PIR3_CBDAs_V527I | 294 | V | I | 253.2 |
| PIR3_CBDAs_V374I | 141 | V | I | 252.8 |
| PIR3_CBDAs_R348H | 115 | R | H | 250.4 |
| PIR3_CBDAs_S380N | 147 | S | N | 248.9 |
| PIR3_CBDAs_S606T | 373 | S | T | 248.6 |
| PIR3_CBDAs_A258P | 25 | A | P | 243.2 |
| PIR3_CBDAs_R507K | 274 | R | K | 243 |
| PIR3_CBDAs_A384P | 151 | A | P | 237.4 |
| PIR3_CBDAs_L670I | 437 | L | I | 227 |
| PIR3_CBDAs_S408N | 175 | S | N | 224.3 |
| PIR3_CBDAs_T522G | 289 | T | G | 220.4 |
| PIR3_CBDAs_N268H | 35 | N | H | 215.2 |
| PIR3_CBDAs_V607A | 374 | V | A | 213.7 |
| PIR3_CBDAs_N707S | 474 | N | S | 210.9 |
| PIR3_CBDAs_I702K | 469 | I | K | 203.1 |
| PIR3_CBDAs_I520V | 287 | I | V | 199.5 |
| PIR3_CBDAs_H301N | 68 | H | N | 195.1 |
| PIR3_CBDAs_F608M | 375 | F | M | 186.4 |
| PIR3_CBDAs_A519T | 286 | A | T | 181.3 |
| PIR3_CBDAs_D727N | 494 | D | N | 174.8 |
| PIR3_CBDAs_N589K | 356 | N | K | 172.2 |
| PIR3_CBDAs_D704N | 471 | D | N | 162 |
| PIR3_CBDAs_T308S | 75 | T | S | 161.7 |
| PIR3_CBDAs_I657T | 424 | I | T | 160.2 |
| PIR3_CBDAs_V484F | 251 | V | F | 160 |
| PIR3_CBDAs_I673V | 440 | I | V | 157.8 |
| PIR3_CBDAs_A385G | 152 | A | G | 145.6 |
| PIR3_CBDAs_I474N | 241 | I | N | 141.2 |
| PIR3_CBDAs_A447G | 214 | A | G | 127.5 |
| PIR3_CBDAs_L529H | 296 | L | H | 112.1 |
| PIR3_CBDAs_M680T | 447 | M | T | 100.3 |
| PIR3_CBDAs_P270Q | 37 | P | Q | 96.2 |
| PIR3_CBDAs_N703T | 470 | N | T | 96.1 |
| PIR3_CBDAs_L556F | 323 | L | F | 92.9 |
| PIR3_CBDAs_L381F | 148 | L | F | 76.8 |
| PIR3_CBDAs_E479G | 246 | E | G | 75.3 |
| PIR3_CBDAs_I562T | 329 | I | T | 10.5 |

TABLE 24
yCBGA_0513 mutant strains

| | | SEQ |
|---|---|---|
| | | ID |
| Constructs | CBDA amino acid sequence | NO: |
| PIR3_CB | NIQTSIANPRENFLKCFSQYIPNNATNLKLVYTQNNPLYMSVLNS | 153 |
| DAs_S449 | TIHNLRFSSDTTPKPLVIVTPSHVSHIQGTILCSKKVGLQIRTRSGG | |
| N | HDSEGMSYISQVPFVIVDLRNMRSIKIDVHSQTAWVEAGATLGE | |
| | VYYWVNEKNESLSLAAGYCPTVCAGGHFGGGGYGPLMRSYGL | |
| | AADNIIDAHLVNVHGKVLDRKSMGEDLFWALRGGGAENFGIIV | |
| | AWKIRLVAVPKSTMFSVKKIMEIHELVKLVNKWQNIAYKYDKD | |
| | LLLMTHFITRNITDNQGKNKTAIHTYFSSVFLGGVDSLVDLMNK | |
| | SFPELGIKKTDCRQLSWIDTIIFYSGVVNYDTDNFNKEILLDRSAG | |
| | QNGAFKIKLDYVKKPIPESVFVQILEKLYEEDIGAGMYALYPYG | |
| | GIMDEISESAIPFPHRAGILYELWYICSWEKQEDNEKHLNWIRNI | |
| | YNFMTPYVSQNPRLAYLNYRDLDIGINDPKNPNNYTQARIWGE | |
| | KYFGKNFDRLVKVKTLVDPNNFFRNEQSIPPLPRHRH | |
| PIR3_CB | NIQTSIANPRENFLKCFSQYIPNNATNLKLVYTQNNPLYMSVLNS | 154 |
| DAs_G30 | TIHNLRFSSDTTPKPLVIVTPSHVSHIQATILCSKKVGLQIRTRSGG | |
| 7A | HDSEGMSYISQVPFVIVDLRNMRSIKIDVHSQTAWVEAGATLGE | |
| | VYYWVNEKNESLSLAAGYCPTVCAGGHFGGGGYGPLMRSYGL | |
| | AADNIIDAHLVNVHGKVLDRKSMGEDLFWALRGGGAESFGIIV | |
| | AWKIRLVAVPKSTMFSVKKIMEIHELVKLVNKWQNIAYKYDKD | |
| | LLLMTHFITRNITDNQGKNKTAIHTYFSSVFLGGVDSLVDLMNK | |
| | SFPELGIKKTDCRQLSWIDTIIFYSGVVNYDTDNFNKEILLDRSAG | |
| | QNGAFKIKLDYVKKPIPESVFVQILEKLYEEDIGAGMYALYPYG | |
| | GIMDEISESAIPFPHRAGILYELWYICSWEKQEDNEKHLNWIRNI | |
| | YNFMTPYVSQNPRLAYLNYRDLDIGINDPKNPNNYTQARIWGE | |
| | KYFGKNFDRLVKVKTLVDPNNFFRNEQSIPPLPRHRH | |
| PIR3_CB | NIQTSIANPRENFLKCFSQYIPNNATNLKLVYTQNNPLYMSVLNS | 155 |
| DAs_H42 | TIHNLRFSSDTTPKPLVIVTPSHVSHIQGTILCSKKVGLQIRTRSGG | |
| 5D | HDSEGMSYISQVPFVIVDLRNMRSIKIDVHSQTAWVEAGATLGE | |
| | VYYWVNEKNESLSLAAGYCPTVCAGGHFGGGGYGPLMRSYGL | |
| | AADNIIDAHLVNVDGKVLDRKSMGEDLFWALRGGGAESFGIIV | |
| | AWKIRLVAVPKSTMFSVKKIMEIHELVKLVNKWQNIAYKYDKD | |
| | LLLMTHFITRNITDNQGKNKTAIHTYFSSVFLGGVDSLVDLMNK | |
| | SFPELGIKKTDCRQLSWIDTIIFYSGVVNYDTDNFNKEILLDRSAG | |
| | QNGAFKIKLDYVKKPIPESVFVQILEKLYEEDIGAGMYALYPYG | |
| | GIMDEISESAIPFPHRAGILYELWYICSWEKQEDNEKHLNWIRNI | |
| | YNFMTPYVSQNPRLAYLNYRDLDIGINDPKNPNNYTQARIWGE | |
| | KYFGKNFDRLVKVKTLVDPNNFFRNEQSIPPLPRHRH | |
| PIR3_CB | NIQTSIANPRENFLKCFSQYIPNNATNLKLVYTQNNPLYMSVLNS | 156 |
| DAs_P464 | TIHNLRFSSDTTPKPLVIVTPSHVSHIQGTILCSKKVGLQIRTRSGG | |
| PS | HDSEGMSYISQVPFVIVDLRNMRSIKIDVHSQTAWVEAGATLGE | |
| | VYYWVNEKNESLSLAAGYCPTVCAGGHFGGGGYGPLMRSYGL | |
| | AADNIIDAHLVNVHGKVLDRKSMGEDLFWALRGGGAESFGIIV | |
| | AWKIRLVAVPSKSTMFSVKKIMEIHELVKLVNKWQNIAYKYDK | |
| | DLLLMTHFITRNITDNQGKNKTAIHTYFSSVFLGGVDSLVDLMN | |
| | KSFPELGIKKTDCRQLSWIDTIIFYSGVVNYDTDNFNKEILLDRSA | |
| | GQNGAFKIKLDYVKKPIPESVFVQILEKLYEEDIGAGMYALYPY | |
| | GGIMDEISESAIPFPHRAGILYELWYICSWEKQEDNEKHLNWIRN | |
| | IYNFMTPYVSQNPRLAYLNYRDLDIGINDPKNPNNYTQARIWGE | |
| | KYFGKNFDRLVKVKTLVDPNNFFRNEQSIPPLPRHRH | |
| PIR3_CB | NIQTSIANPRENFLKCFSQYIPNNATNLKLVYTQNDPLYMSVLNS | 157 |
| DAs_N26 | TIHNLRFSSDTTPKPLVIVTPSHVSHIQGTILCSKKVGLQIRTRSGG | |
| 9D | HDSEGMSYISQVPFVIVDLRNMRSIKIDVHSQTAWVEAGATLGE | |
| | VYYWVNEKNESLSLAAGYCPTVCAGGHFGGGGYGPLMRSYGL | |
| | AADNIIDAHLVNVHGKVLDRKSMGEDLFWALRGGGAESFGIIV | |
| | AWKIRLVAVPKSTMFSVKKIMEIHELVKLVNKWQNIAYKYDKD | |
| | LLLMTHFITRNITDNQGKNKTAIHTYFSSVFLGGVDSLVDLMNK | |
| | SFPELGIKKTDCRQLSWIDTIIFYSGVVNYDTDNFNKEILLDRSAG | |
| | QNGAFKIKLDYVKKPIPESVFVQILEKLYEEDIGAGMYALYPYG | |
| | GIMDEISESAIPFPHRAGILYELWYICSWEKQEDNEKHLNWIRNI | |
| | YNFMTPYVSQNPRLAYLNYRDLDIGINDPKNPNNYTQARIWGE | |
| | KYFGKNFDRLVKVKTLVDPNNFFRNEQSIPPLPRHRH | |
| PIR3_CB | NIQTSIANPRENFLKCFSQYIPNNATNLKLVYTQNNPLYMSVLNS | 158 |
| DAs_V45 | TIHNLRFSSDTTPKPLVIVTPSHVSHIQGTILCSKKVGLQIRTRSGG | |
| 4A | HDSEGMSYISQVPFVIVDLRNMRSIKIDVHSQTAWVEAGATLGE | |
| | VYYWVNEKNESLSLAAGYCPTVCAGGHFGGGGYGPLMRSYGL | |
| | AADNIIDAHLVNVHGKVLDRKSMGEDLFWALRGGGAESFGIIA | |
| | AWKIRLVAVPKSTMFSVKKIMEIHELVKLVNKWQNIAYKYDKD | |
| | LLLMTHFITRNITDNQGKNKTAIHTYFSSVFLGGVDSLVDLMNK | |
| | SFPELGIKKTDCRQLSWIDTIIFYSGVVNYDTDNFNKEILLDRSAG | |
| | QNGAFKIKLDYVKKPIPESVFVQILEKLYEEDIGAGMYALYPYG | |
| | GIMDEISESAIPFPHRAGILYELWYICSWEKQEDNEKHLNWIRNI | |
| | YNFMTPYVSQNPRLAYLNYRDLDIGINDPKNPNNYTQARIWGE | |
| | KYFGKNFDRLVKVKTLVDPNNFFRNEQSIPPLPRHRH | |
| PIR3_CB | NIQTSIANPRENFLKCFSQYIPNNATNLKLVYTQNNPLYMSVLNS | 159 |
| DAs_M46 | TIHNLRFSSDTTPKPLVIVTPSHVSHIQGTILCSKKVGLQIRTRSGG | |
| 81 | HDSEGMSYISQVPFVIVDLRNMRSIKIDVHSQTAWVEAGATLGE | |
| | VYYWVNEKNESLSLAAGYCPTVCAGGHFGGGGYGPLMRSYGL | |
| | AADNIIDAHLVNVHGKVLDRKSMGEDLFWALRGGGAESFGIIV | |
| | AWKIRLVAVPKSTIFSVKKIMEIHELVKLVNKWQNIAYKYDKDL | |
| | LLMTHFITRNITDNQGKNKTAIHTYFSSVFLGGVDSLVDLMNKS | |
| | FPELGIKKTDCRQLSWIDTIIFYSGVVNYDTDNFNKEILLDRSAG | |
| | QNGAFKIKLDYVKKPIPESVFVQILEKLYEEDIGAGMYALYPYG | |
| | GIMDEISESAIPFPHRAGILYELWYICSWEKQEDNEKHLNWIRNI | |
| | YNFMTPYVSQNPRLAYLNYRDLDIGINDPKNPNNYTQARIWGE | |
| | KYFGKNFDRLVKVKTLVDPNNFFRNEQSIPPLPRHRH | |
| PIR3_CB | NIQTSIANPRENFLKCFSQYIPNNATNLKLVYTQNNPLYMSVLNS | 160 |
| DAs_I700 | TIHNLRFSSDTTPKPLVIVTPSHVSHIQGTILCSKKVGLQIRTRSGG | |
| L | HDSEGMSYISQVPFVIVDLRNMRSIKIDVHSQTAWVEAGATLGE | |
| | VYYWVNEKNESLSLAAGYCPTVCAGGHFGGGGYGPLMRSYGL | |
| | AADNIIDAHLVNVHGKVLDRKSMGEDLFWALRGGGAESFGIIV | |
| | AWKIRLVAVPKSTMFSVKKIMEIHELVKLVNKWQNIAYKYDKD | |
| | LLLMTHFITRNITDNQGKNKTAIHTYFSSVFLGGVDSLVDLMNK | |
| | SFPELGIKKTDCRQLSWIDTIIFYSGVVNYDTDNFNKEILLDRSAG | |
| | QNGAFKIKLDYVKKPIPESVFVQILEKLYEEDIGAGMYALYPYG | |
| | GIMDEISESAIPFPHRAGILYELWYICSWEKQEDNEKHLNWIRNI | |
| | YNFMTPYVSQNPRLAYLNYRDLDLGINDPKNPNNYTQARIWGE | |
| | KYFGKNFDRLVKVKTLVDPNNFFRNEQSIPPLPRHRH | |
| PIR3_CB | NIQTSIANPRENFLKCFSQYIPNNATNLKLVYTQNNPLYMSVLNS | 161 |
| DAs_Y57 | TIHNLRFSSDTTPKPLVIVTPSHVSHIQGTILCSKKVGLQIRTRSGG | |
| 1F | HDSEGMSYISQVPFVIVDLRNMRSIKIDVHSQTAWVEAGATLGE | |
| | VYYWVNEKNESLSLAAGYCPTVCAGGHFGGGGYGPLMRSYGL | |
| | AADNIIDAHLVNVHGKVLDRKSMGEDLFWALRGGGAESFGIIV | |
| | AWKIRLVAVPKSTMFSVKKIMEIHELVKLVNKWQNIAYKYDKD | |
| | LLLMTHFITRNITDNQGKNKTAIHTYFSSVFLGGVDSLVDLMNK | |
| | SFPELGIKKTDCRQLSWIDTIIFYSGVVNFDTDNFNKEILLDRSAG | |
| | QNGAFKIKLDYVKKPIPESVFVQILEKLYEEDIGAGMYALYPYG | |
| | GIMDEISESAIPFPHRAGILYELWYICSWEKQEDNEKHLNWIRNI | |
| | YNFMTPYVSQNPRLAYLNYRDLDIGINDPKNPNNYTQARIWGE | |
| | KYFGKNFDRLVKVKTLVDPNNFFRNEQSIPPLPRHRH | |
| PIR3_CB | NIQTSIANPRENFLKCFSQYIPNNATNLKLVYTQNNPLYMSVLNS | 162 |
| DAs_L44 | TIHNLRFSSDTTPKPLVIVTPSHVSHIQGTILCSKKVGLQIRTRSGG | |
| 2I | HDSEGMSYISQVPFVIVDLRNMRSIKIDVHSQTAWVEAGATLGE | |
| | VYYWVNEKNESLSLAAGYCPTVCAGGHFGGGGYGPLMRSYGL | |
| | AADNIIDAHLVNVHGKVLDRKSMGEDLFWAIRGGGAESFGIIVA | |
| | WKIRLVAVPKSTMFSVKKIMEIHELVKLVNKWQNIAYKYDKDL | |
| | LLMTHFITRNITDNQGKNKTAIHTYFSSVFLGGVDSLVDLMNKS | |
| | FPELGIKKTDCRQLSWIDTIIFYSGVVNYDTDNFNKEILLDRSAG | |
| | QNGAFKIKLDYVKKPIPESVFVQILEKLYEEDIGAGMYALYPYG | |
| | GIMDEISESAIPFPHRAGILYELWYICSWEKQEDNEKHLNWIRNI | |
| | YNFMTPYVSQNPRLAYLNYRDLDIGINDPKNPNNYTQARIWGE | |
| | KYFGKNFDRLVKVKTLVDPNNFFRNEQSIPPLPRHRH | |
| PIR3_CB | NIQTSIANPRENFLKCFSQYIPNNATNLKLVYTQNNPLYMSVLNS | 163 |
| DAs_S328 | TIHNLRFSSDTTPKPLVIVTPSHVSHIQGTILCSKKVGLQIRTRSGG | |
| A | HDAEGMSYISQVPFVIVDLRNMRSIKIDVHSQTAWVEAGATLGE | |
| | VYYWVNEKNESLSLAAGYCPTVCAGGHFGGGGYGPLMRSYGL | |
| | AADNIIDAHLVNVHGKVLDRKSMGEDLFWALRGGGAESFGIIV | |
| | AWKIRLVAVPKSTMFSVKKIMEIHELVKLVNKWQNIAYKYDKD | |
| | LLLMTHFITRNITDNQGKNKTAIHTYFSSVFLGGVDSLVDLMNK | |
| | SFPELGIKKTDCRQLSWIDTIIFYSGVVNYDTDNFNKEILLDRSAG | |
| | QNGAFKIKLDYVKKPIPESVFVQILEKLYEEDIGAGMYALYPYG | |
| | GIMDEISESAIPFPHRAGILYELWYICSWEKQEDNEKHLNWIRNI | |
| | YNFMTPYVSQNPRLAYLNYRDLDIGINDPKNPNNYTQARIWGE | |
| | KYFGKNFDRLVKVKTLVDPNNFFRNEQSIPPLPRHRH | |
| PIR3_CB | NIQTSIANPRENFLKCFSQYIPNNATNLKLVYTQNNPLYMSVLNS | 164 |
| DAs_I620 | TIHNLRFSSDTTPKPLVIVTPSHVSHIQGTILCSKKVGLQIRTRSGG | |
| V | HDSEGMSYISQVPFVIVDLRNMRSIKIDVHSQTAWVEAGATLGE | |
| | VYYWVNEKNESLSLAAGYCPTVCAGGHFGGGGYGPLMRSYGL | |
| | AADNIIDAHLVNVHGKVLDRKSMGEDLFWALRGGGAESFGIIV | |
| | AWKIRLVAVPKSTMFSVKKIMEIHELVKLVNKWQNIAYKYDKD | |
| | LLLMTHFITRNITDNQGKNKTAIHTYFSSVFLGGVDSLVDLMNK | |
| | SFPELGIKKTDCRQLSWIDTIIFYSGVVNYDTDNFNKEILLDRSAG | |
| | QNGAFKIKLDYVKKPIPESVFVQILEKLYEEDVGAGMYALYPYG | |
| | GIMDEISESAIPFPHRAGILYELWYICSWEKQEDNEKHLNWIRNI | |
| | YNFMTPYVSQNPRLAYLNYRDLDIGINDPKNPNNYTQARIWGE | |
| | KYFGKNFDRLVKVKTLVDPNNFFRNEQSIPPLPRHRH | |
| PIR3_CB | NIQTSIANPRENFLKCFSQYIPNNATNLKLVYTQNNPLYMSVLNS | 165 |
| DAs_I676 | TIHNLRFSSDTTPKPLVIVTPSHVSHIQGTILCSKKVGLQIRTRSGG | |
| V | HDSEGMSYISQVPFVIVDLRNMRSIKIDVHSQTAWVEAGATLGE | |
| | VYYWVNEKNESLSLAAGYCPTVCAGGHFGGGGYGPLMRSYGL | |
| | AADNIIDAHLVNVHGKVLDRKSMGEDLFWALRGGGAESFGIIV | |
| | AWKIRLVAVPKSTMFSVKKIMEIHELVKLVNKWQNIAYKYDKD | |
| | LLLMTHFITRNITDNQGKNKTAIHTYFSSVFLGGVDSLVDLMNK | |
| | SFPELGIKKTDCRQLSWIDTIIFYSGVVNYDTDNFNKEILLDRSAG | |
| | QNGAFKIKLDYVKKPIPESVFVQILEKLYEEDIGAGMYALYPYG | |
| | GIMDEISESAIPFPHRAGILYELWYICSWEKQEDNEKHLNWIRNV | |
| | YNFMTPYVSQNPRLAYLNYRDLDIGINDPKNPNNYTQARIWGE | |
| | KYFGKNFDRLVKVKTLVDPNNFFRNEQSIPPLPRHRH | |
| PIR3_CB | NIQTSIANPRENFLKCFSEYIPNNATNLKLVYTQNNPLYMSVLNS | 166 |
| DAs_Q25 | TIHNLRFSSDTTPKPLVIVTPSHVSHIQGTILCSKKVGLQIRTRSGG | |
| 2E | HDSEGMSYISQVPFVIVDLRNMRSIKIDVHSQTAWVEAGATLGE | |
| | VYYWVNEKNESLSLAAGYCPTVCAGGHFGGGGYGPLMRSYGL | |
| | AADNIIDAHLVNVHGKVLDRKSMGEDLFWALRGGGAESFGIIV | |
| | AWKIRLVAVPKSTMFSVKKIMEIHELVKLVNKWQNIAYKYDKD | |
| | LLLMTHFITRNITDNQGKNKTAIHTYFSSVFLGGVDSLVDLMNK | |
| | SFPELGIKKTDCRQLSWIDTIIFYSGVVNYDTDNFNKEILLDRSAG | |
| | QNGAFKIKLDYVKKPIPESVFVQILEKLYEEDIGAGMYALYPYG | |
| | GIMDEISESAIPFPHRAGILYELWYICSWEKQEDNEKHLNWIRNI | |
| | YNFMTPYVSQNPRLAYLNYRDLDIGINDPKNPNNYTQARIWGE | |
| | KYFGKNFDRLVKVKTLVDPNNFFRNEQSIPPLPRHRH | |
| PIR3_CB | NIQTSIANPRENFLKCFSQYIPNNATNLKLVYTQNNPLYMSVLNS | 167 |
| DAs_C39 | TIHNLRFSSDTTPKPLVIVTPSHVSHIQGTILCSKKVGLQIRTRSGG | |
| 2G | HDSEGMSYISQVPFVIVDLRNMRSIKIDVHSQTAWVEAGATLGE | |
| | VYYWVNEKNESLSLAAGYCPTVGAGGHFGGGGYGPLMRSYGL | |
| | AADNIIDAHLVNVHGKVLDRKSMGEDLFWALRGGGAESFGIIV | |
| | AWKIRLVAVPKSTMFSVKKIMEIHELVKLVNKWQNIAYKYDKD | |
| | LLLMTHFITRNITDNQGKNKTAIHTYFSSVFLGGVDSLVDLMNK | |
| | SFPELGIKKTDCRQLSWIDTIIFYSGVVNYDTDNFNKEILLDRSAG | |
| | QNGAFKIKLDYVKKPIPESVFVQILEKLYEEDIGAGMYALYPYG | |
| | GIMDEISESAIPFPHRAGILYELWYICSWEKQEDNEKHLNWIRNI | |
| | YNFMTPYVSQNPRLAYLNYRDLDIGINDPKNPNNYTQARIWGE | |
| | KYFGKNFDRLVKVKTLVDPNNFFRNEQSIPPLPRHRH | |
| PIR3_CB | NIQTSIANPRENFLKCFSQYIPNNATNLKLVYTQNNPLYMSVLNS | 168 |
| DAs_R45 | TIHNLRFSSDTTPKPLVIVTPSHVSHIQGTILCSKKVGLQIRTRSGG | |
| 9K | HDSEGMSYISQVPFVIVDLRNMRSIKIDVHSQTAWVEAGATLGE | |
| | VYYWVNEKNESLSLAAGYCPTVCAGGHFGGGGYGPLMRSYGL | |
| | AADNIIDAHLVNVHGKVLDRKSMGEDLFWALRGGGAESFGIIV | |
| | AWKIKLVAVPKSTMFSVKKIMEIHELVKLVNKWQNIAYKYDKD | |
| | LLLMTHFITRNITDNQGKNKTAIHTYFSSVFLGGVDSLVDLMNK | |
| | SFPELGIKKTDCRQLSWIDTIIFYSGVVNYDTDNFNKEILLDRSAG | |
| | QNGAFKIKLDYVKKPIPESVFVQILEKLYEEDIGAGMYALYPYG | |
| | GIMDEISESAIPFPHRAGILYELWYICSWEKQEDNEKHLNWIRNI | |
| | YNFMTPYVSQNPRLAYLNYRDLDIGINDPKNPNNYTQARIWGE | |
| | KYFGKNFDRLVKVKTLVDPNNFFRNEQSIPPLPRHRH | |
| PIR3_CB | NIQTSIANPRENFLKCFSQYIPNNATNLKLVYTQNNPLYMSVLNS | 169 |
| DAs_I341 | TIHNLRFSSDTTPKPLVIVTPSHVSHIQGTILCSKKVGLQIRTRSGG | |
| V | HDSEGMSYISQVPFVVVDLRNMRSIKIDVHSQTAWVEAGATLG | |
| | EVYYWVNEKNESLSLAAGYCPTVCAGGHFGGGGYGPLMRSYG | |
| | LAADNIIDAHLVNVHGKVLDRKSMGEDLFWALRGGGAESFGIIV | |
| | AWKIRLVAVPKSTMFSVKKIMEIHELVKLVNKWQNIAYKYDKD | |
| | LLLMTHFITRNITDNQGKNKTAIHTYFSSVFLGGVDSLVDLMNK | |
| | SFPELGIKKTDCRQLSWIDTIIFYSGVVNYDTDNFNKEILLDRSAG | |
| | QNGAFKIKLDYVKKPIPESVFVQILEKLYEEDIGAGMYALYPYG | |
| | GIMDEISESAIPFPHRAGILYELWYICSWEKQEDNEKHLNWIRNI | |
| | YNFMTPYVSQNPRLAYLNYRDLDIGINDPKNPNNYTQARIWGE | |
| | KYFGKNFDRLVKVKTLVDPNNFFRNEQSIPPLPRHRH | |
| PIR3_CB | NIQTSIANPRENFLKCFSQYIPNNATNLKLVYTQNNPLYMSVLNS | 170 |
| DAs_A62 | TIHNLRFSSDTTPKPLVIVTPSHVSHIQGTILCSKKVGLQIRTRSGG | |
| 6V | HDSEGMSYISQVPFVIVDLRNMRSIKIDVHSQTAWVEAGATLGE | |
| | VYYWVNEKNESLSLAAGYCPTVCAGGHFGGGGYGPLMRSYGL | |
| | AADNIIDAHLVNVHGKVLDRKSMGEDLFWALRGGGAESFGIIV | |
| | AWKIRLVAVPKSTMFSVKKIMEIHELVKLVNKWQNIAYKYDKD | |
| | LLLMTHFITRNITDNQGKNKTAIHTYFSSVFLGGVDSLVDLMNK | |
| | SFPELGIKKTDCRQLSWIDTIIFYSGVVNYDTDNFNKEILLDRSAG | |
| | QNGAFKIKLDYVKKPIPESVFVQILEKLYEEDIGAGMYVLYPYG | |
| | GIMDEISESAIPFPHRAGILYELWYICSWEKQEDNEKHLNWIRNI | |
| | YNFMTPYVSQNPRLAYLNYRDLDIGINDPKNPNNYTQARIWGE | |
| | KYFGKNFDRLVKVKTLVDPNNFFRNEQSIPPLPRHRH | |
| PIR3_CB | NIQTSIANPRENFLKCFSQYIPNNATNPKLVYTQNNPLYMSVLNS | 171 |
| DAs_L26 | TIHNLRFSSDTTPKPLVIVTPSHVSHIQGTILCSKKVGLQIRTRSGG | |
| 1P | HDSEGMSYISQVPFVIVDLRNMRSIKIDVHSQTAWVEAGATLGE | |
| | VYYWVNEKNESLSLAAGYCPTVCAGGHFGGGGYGPLMRSYGL | |
| | AADNIIDAHLVNVHGKVLDRKSMGEDLFWALRGGGAESFGIIV | |
| | AWKIRLVAVPKSTMFSVKKIMEIHELVKLVNKWQNIAYKYDKD | |
| | LLLMTHFITRNITDNQGKNKTAIHTYFSSVFLGGVDSLVDLMNK | |
| | SFPELGIKKTDCRQLSWIDTIIFYSGVVNYDTDNFNKEILLDRSAG | |
| | QNGAFKIKLDYVKKPIPESVFVQILEKLYEEDIGAGMYALYPYG | |
| | GIMDEISESAIPFPHRAGILYELWYICSWEKQEDNEKHLNWIRNI | |
| | YNFMTPYVSQNPRLAYLNYRDLDIGINDPKNPNNYTQARIWGE | |
| | KYFGKNFDRLVKVKTLVDPNNFFRNEQSIPPLPRHRH | |
| PIR3_CB | NIQTSIANPRENFLKCFSQYIPNNATNLKLVYTQNNPLYMSVLNS | 172 |
| DAs_G59 | TIHNLRFSSDTTPKPLVIVTPSHVSHIQGTILCSKKVGLQIRTRSGG | |
| 0T | HDSEGMSYISQVPFVIVDLRNMRSIKIDVHSQTAWVEAGATLGE | |
| | VYYWVNEKNESLSLAAGYCPTVCAGGHFGGGGYGPLMRSYGL | |
| | AADNIIDAHLVNVHGKVLDRKSMGEDLFWALRGGGAESFGIIV | |
| | AWKIRLVAVPKSTMFSVKKIMEIHELVKLVNKWQNIAYKYDKD | |
| | LLLMTHFITRNITDNQGKNKTAIHTYFSSVFLGGVDSLVDLMNK | |
| | SFPELGIKKTDCRQLSWIDTIIFYSGVVNYDTDNFNKEILLDRSAG | |
| | QNTAFKIKLDYVKKPIPESVFVQILEKLYEEDIGAGMYALYPYG | |
| | GIMDEISESAIPFPHRAGILYELWYICSWEKQEDNEKHLNWIRNI | |
| | YNFMTPYVSQNPRLAYLNYRDLDIGINDPKNPNNYTQARIWGE | |
| | KYFGKNFDRLVKVKTLVDPNNFFRNEQSIPPLPRHRH | |
| PIR3_CB | NIQTSIANPRENFLKCFSQYIPNNATNLKLVYTQNNPLYMSVLNS | 173 |
| DAs_C65 | TIHNLRFSSDTTPKPLVIVTPSHVSHIQGTILCSKKVGLQIRTRSGG | |
| 8A | HDSEGMSYISQVPFVIVDLRNMRSIKIDVHSQTAWVEAGATLGE | |
| | VYYWVNEKNESLSLAAGYCPTVCAGGHFGGGGYGPLMRSYGL | |
| | AADNIIDAHLVNVHGKVLDRKSMGEDLFWALRGGGAESFGIIV | |
| | AWKIRLVAVPKSTMFSVKKIMEIHELVKLVNKWQNIAYKYDKD | |
| | LLLMTHFITRNITDNQGKNKTAIHTYFSSVFLGGVDSLVDLMNK | |
| | SFPELGIKKTDCRQLSWIDTIIFYSGVVNYDTDNFNKEILLDRSAG | |
| | QNGAFKIKLDYVKKPIPESVFVQILEKLYEEDIGAGMYALYPYG | |
| | GIMDEISESAIPFPHRAGILYELWYIASWEKQEDNEKHLNWIRNI | |
| | YNFMTPYVSQNPRLAYLNYRDLDIGINDPKNPNNYTQARIWGE | |
| | KYFGKNFDRLVKVKTLVDPNNFFRNEQSIPPLPRHRH | |
| PIR3_CB | NIQTSIANPRENFLKCFSQYIPNNATNLKLIYTQNNPLYMSVLNS | 174 |
| DAs_V26 | TIHNLRFSSDTTPKPLVIVTPSHVSHIQGTILCSKKVGLQIRTRSGG | |
| 4I | HDSEGMSYISQVPFVIVDLRNMRSIKIDVHSQTAWVEAGATLGE | |
| | VYYWVNEKNESLSLAAGYCPTVCAGGHFGGGGYGPLMRSYGL | |
| | AADNIIDAHLVNVHGKVLDRKSMGEDLFWALRGGGAESFGIIV | |
| | AWKIRLVAVPKSTMFSVKKIMEIHELVKLVNKWQNIAYKYDKD | |
| | LLLMTHFITRNITDNQGKNKTAIHTYFSSVFLGGVDSLVDLMNK | |
| | SFPELGIKKTDCRQLSWIDTIIFYSGVVNYDTDNFNKEILLDRSAG | |
| | QNGAFKIKLDYVKKPIPESVFVQILEKLYEEDIGAGMYALYPYG | |
| | GIMDEISESAIPFPHRAGILYELWYICSWEKQEDNEKHLNWIRNI | |
| | YNFMTPYVSQNPRLAYLNYRDLDIGINDPKNPNNYTQARIWGE | |
| | KYFGKNFDRLVKVKTLVDPNNFFRNEQSIPPLPRHRH | |
| PIR3_CB | NIQTSIANPRENFLKCFSQYIPNNATNLKLVYTQNNPLYMSVLNS | 175 |
| DAs_A62 | TIHNLRFSSDTTPKPLVIVTPSHVSHIQGTILCSKKVGLQIRTRSGG | |
| 2V | HDSEGMSYISQVPFVIVDLRNMRSIKIDVHSQTAWVEAGATLGE | |
| | VYYWVNEKNESLSLAAGYCPTVCAGGHFGGGGYGPLMRSYGL | |
| | AADNIIDAHLVNVHGKVLDRKSMGEDLFWALRGGGAESFGIIV | |
| | AWKIRLVAVPKSTMFSVKKIMEIHELVKLVNKWQNIAYKYDKD | |
| | LLLMTHFITRNITDNQGKNKTAIHTYFSSVFLGGVDSLVDLMNK | |
| | SFPELGIKKTDCRQLSWIDTIIFYSGVVNYDTDNFNKEILLDRSAG | |
| | QNGAFKIKLDYVKKPIPESVFVQILEKLYEEDIGVGMYALYPYG | |
| | GIMDEISESAIPFPHRAGILYELWYICSWEKQEDNEKHLNWIRNI | |
| | YNFMTPYVSQNPRLAYLNYRDLDIGINDPKNPNNYTQARIWGE | |
| | KYFGKNFDRLVKVKTLVDPNNFFRNEQSIPPLPRHRH | |
| PIR3_CB | NIQTSIANPRENFLKCFSQYIPNNATNLKLVYTQNNPLYMSVLNS | 176 |
| DAs_N67 | TIHNLRFSSDTTPKPLVIVTPSHVSHIQGTILCSKKVGLQIRTRSGG | |
| 5S | HDSEGMSYISQVPFVIVDLRNMRSIKIDVHSQTAWVEAGATLGE | |
| | VYYWVNEKNESLSLAAGYCPTVCAGGHFGGGGYGPLMRSYGL | |
| | AADNIIDAHLVNVHGKVLDRKSMGEDLFWALRGGGAESFGIIV | |
| | AWKIRLVAVPKSTMFSVKKIMEIHELVKLVNKWQNIAYKYDKD | |
| | LLLMTHFITRNITDNQGKNKTAIHTYFSSVFLGGVDSLVDLMNK | |
| | SFPELGIKKTDCRQLSWIDTIIFYSGVVNYDTDNFNKEILLDRSAG | |
| | QNGAFKIKLDYVKKPIPESVFVQILEKLYEEDIGAGMYALYPYG | |
| | GIMDEISESAIPFPHRAGILYELWYICSWEKQEDNEKHLNWIRSIY | |
| | NFMTPYVSQNPRLAYLNYRDLDIGINDPKNPNNYTQARIWGEK | |
| | YFGKNFDRLVKVKTLVDPNNFFRNEQSIPPLPRHRH | |
| PIR3_CB | NIQTSIANPQENFLKCFSQYIPNNATNLKLVYTQNNPLYMSVLNS | 177 |
| DAs_R24 | TIHNLRFSSDTTPKPLVIVTPSHVSHIQGTILCSKKVGLQIRTRSGG | |
| 3Q | HDSEGMSYISQVPFVIVDLRNMRSIKIDVHSQTAWVEAGATLGE | |
| | VYYWVNEKNESLSLAAGYCPTVCAGGHFGGGGYGPLMRSYGL | |
| | AADNIIDAHLVNVHGKVLDRKSMGEDLFWALRGGGAESFGIIV | |
| | AWKIRLVAVPKSTMFSVKKIMEIHELVKLVNKWQNIAYKYDKD | |
| | LLLMTHFITRNITDNQGKNKTAIHTYFSSVFLGGVDSLVDLMNK | |
| | SFPELGIKKTDCRQLSWIDTIIFYSGVVNYDTDNFNKEILLDRSAG | |
| | QNGAFKIKLDYVKKPIPESVFVQILEKLYEEDIGAGMYALYPYG | |
| | GIMDEISESAIPFPHRAGILYELWYICSWEKQEDNEKHLNWIRNI | |
| | YNFMTPYVSQNPRLAYLNYRDLDIGINDPKNPNNYTQARIWGE | |
| | KYFGKNFDRLVKVKTLVDPNNFFRNEQSIPPLPRHRH | |
| PIR3_CB | NIQTSIANPRENFLKCFSQYIPNNATNLKLVYTQNNPLYMSVLNS | 178 |
| DAs_L65 | TIHNLRFSSDTTPKPLVIVTPSHVSHIQGTILCSKKVGLQIRTRSGG | |
| 1M | HDSEGMSYISQVPFVIVDLRNMRSIKIDVHSQTAWVEAGATLGE | |
| | VYYWVNEKNESLSLAAGYCPTVCAGGHFGGGGYGPLMRSYGL | |
| | AADNIIDAHLVNVHGKVLDRKSMGEDLFWALRGGGAESFGIIV | |
| | AWKIRLVAVPKSTMFSVKKIMEIHELVKLVNKWQNIAYKYDKD | |
| | LLLMTHFITRNITDNQGKNKTAIHTYFSSVFLGGVDSLVDLMNK | |
| | SFPELGIKKTDCRQLSWIDTIIFYSGVVNYDTDNFNKEILLDRSAG | |
| | QNGAFKIKLDYVKKPIPESVFVQILEKLYEEDIGAGMYALYPYG | |
| | GIMDEISESAIPFPHRAGIMYELWYICSWEKQEDNEKHLNWIRNI | |
| | YNFMTPYVSQNPRLAYLNYRDLDIGINDPKNPNNYTQARIWGE | |
| | KYFGKNFDRLVKVKTLVDPNNFFRNEQSIPPLPRHRH | |
| PIR3_CB | NIQTSIANPRENFLKCFSQYIPNNATNLKLVYTQNNPLYMSVLNS | 179 |
| DAs_H28 | TIQNLRFSSDTTPKPLVIVTPSHVSHIQGTILCSKKVGLQIRTRSGG | |
| 1Q | HDSEGMSYISQVPFVIVDLRNMRSIKIDVHSQTAWVEAGATLGE | |
| | VYYWVNEKNESLSLAAGYCPTVCAGGHFGGGGYGPLMRSYGL | |
| | AADNIIDAHLVNVHGKVLDRKSMGEDLFWALRGGGAESFGIIV | |
| | AWKIRLVAVPKSTMFSVKKIMEIHELVKLVNKWQNIAYKYDKD | |
| | LLLMTHFITRNITDNQGKNKTAIHTYFSSVFLGGVDSLVDLMNK | |
| | SFPELGIKKTDCRQLSWIDTIIFYSGVVNYDTDNFNKEILLDRSAG | |
| | QNGAFKIKLDYVKKPIPESVFVQILEKLYEEDIGAGMYALYPYG | |
| | GIMDEISESAIPFPHRAGILYELWYICSWEKQEDNEKHLNWIRNI | |
| | YNFMTPYVSQNPRLAYLNYRDLDIGINDPKNPNNYTQARIWGE | |
| | KYFGKNFDRLVKVKTLVDPNNFFRNEQSIPPLPRHRH | |
| PIR3_CB | NIQTSIANPRENFLKCFSQYIPNNATNLKLVYTQNNPLYMSVLNS | 180 |
| DAs_R55 | TIHNLRFSSDTTPKPLVIVTPSHVSHIQGTILCSKKVGLQIRTRSGG | |
| 4K | HDSEGMSYISQVPFVIVDLRNMRSIKIDVHSQTAWVEAGATLGE | |
| | VYYWVNEKNESLSLAAGYCPTVCAGGHFGGGGYGPLMRSYGL | |
| | AADNIIDAHLVNVHGKVLDRKSMGEDLFWALRGGGAESFGIIV | |
| | AWKIRLVAVPKSTMFSVKKIMEIHELVKLVNKWQNIAYKYDKD | |
| | LLLMTHFITRNITDNQGKNKTAIHTYFSSVFLGGVDSLVDLMNK | |
| | SFPELGIKKTDCKQLSWIDTIIFYSGVVNYDTDNFNKEILLDRSAG | |
| | QNGAFKIKLDYVKKPIPESVFVQILEKLYEEDIGAGMYALYPYG | |
| | GIMDEISESAIPFPHRAGILYELWYICSWEKQEDNEKHLNWIRNI | |
| | YNFMTPYVSQNPRLAYLNYRDLDIGINDPKNPNNYTQARIWGE | |
| | KYFGKNFDRLVKVKTLVDPNNFFRNEQSIPPLPRHRH | |
| PIR3_CB | NIQTSIANPRENFLKCFSQYIPNNATNLKLVYTQNNPLYMSVLNS | 181 |
| DAs_K70 | TIHNLRFSSDTTPKPLVIVTPSHVSHIQGTILCSKKVGLQIRTRSGG | |
| 6E | HDSEGMSYISQVPFVIVDLRNMRSIKIDVHSQTAWVEAGATLGE | |
| | VYYWVNEKNESLSLAAGYCPTVCAGGHFGGGGYGPLMRSYGL | |
| | AADNIIDAHLVNVHGKVLDRKSMGEDLFWALRGGGAESFGIIV | |
| | AWKIRLVAVPKSTMFSVKKIMEIHELVKLVNKWQNIAYKYDKD | |
| | LLLMTHFITRNITDNQGKNKTAIHTYFSSVFLGGVDSLVDLMNK | |
| | SFPELGIKKTDCRQLSWIDTIIFYSGVVNYDTDNFNKEILLDRSAG | |
| | QNGAFKIKLDYVKKPIPESVFVQILEKLYEEDIGAGMYALYPYG | |
| | GIMDEISESAIPFPHRAGILYELWYICSWEKQEDNEKHLNWIRNI | |
| | YNFMTPYVSQNPRLAYLNYRDLDIGINDPENPNNYTQARIWGEK | |
| | YFGKNFDRLVKVKTLVDPNNFFRNEQSIPPLPRHRH | |
| PIR3_CB | NIQTSIANPRENFLKCFSQYIPNNATNLKLVYTQNNPLYMSVLNS | 182 |
| DAs_Q55 | TIHNLRFSSDTTPKPLVIVTPSHVSHIQGTILCSKKVGLQIRTRSGG | |
| 5E | HDSEGMSYISQVPFVIVDLRNMRSIKIDVHSQTAWVEAGATLGE | |
| | VYYWVNEKNESLSLAAGYCPTVCAGGHFGGGGYGPLMRSYGL | |
| | AADNIIDAHLVNVHGKVLDRKSMGEDLFWALRGGGAESFGIIV | |
| | AWKIRLVAVPKSTMFSVKKIMEIHELVKLVNKWQNIAYKYDKD | |
| | LLLMTHFITRNITDNQGKNKTAIHTYFSSVFLGGVDSLVDLMNK | |
| | SFPELGIKKTDCRELSWIDTIIFYSGVVNYDTDNFNKEILLDRSAG | |
| | QNGAFKIKLDYVKKPIPESVFVQILEKLYEEDIGAGMYALYPYG | |
| | GIMDEISESAIPFPHRAGILYELWYICSWEKQEDNEKHLNWIRNI | |
| | YNFMTPYVSQNPRLAYLNYRDLDIGINDPKNPNNYTQARIWGE | |
| | KYFGKNFDRLVKVKTLVDPNNFFRNEQSIPPLPRHRH | |
| PIR3_CB | NIQTSIANPRENFLKCFSQYIPNNATNLKLVYTQNNPLYMSVLNS | 183 |
| DAs_R75 | TIHNLRFSSDTTPKPLVIVTPSHVSHIQGTILCSKKVGLQIRTRSGG | |
| 5H | HDSEGMSYISQVPFVIVDLRNMRSIKIDVHSQTAWVEAGATLGE | |
| | VYYWVNEKNESLSLAAGYCPTVCAGGHFGGGGYGPLMRSYGL | |
| | AADNIIDAHLVNVHGKVLDRKSMGEDLFWALRGGGAESFGIIV | |
| | AWKIRLVAVPKSTMFSVKKIMEIHELVKLVNKWQNIAYKYDKD | |
| | LLLMTHFITRNITDNQGKNKTAIHTYFSSVFLGGVDSLVDLMNK | |
| | SFPELGIKKTDCRQLSWIDTIIFYSGVVNYDTDNFNKEILLDRSAG | |
| | QNGAFKIKLDYVKKPIPESVFVQILEKLYEEDIGAGMYALYPYG | |
| | GIMDEISESAIPFPHRAGILYELWYICSWEKQEDNEKHLNWIRNI | |
| | YNFMTPYVSQNPRLAYLNYRDLDIGINDPKNPNNYTQARIWGE | |
| | KYFGKNFDRLVKVKTLVDPNNFFRNEQSIPPLPRHHH | |
| PIR3_CB | NIQTSIANPRENFLKCFSQYIPNNATNLKLVYTQNNPLYMSVLNS | 184 |
| DAs_R75 | TIHNLRFSSDTTPKPLVIVTPSHVSHIQGTILCSKKVGLQIRTRSGG | |
| 3P | HDSEGMSYISQVPFVIVDLRNMRSIKIDVHSQTAWVEAGATLGE | |
| | VYYWVNEKNESLSLAAGYCPTVCAGGHFGGGGYGPLMRSYGL | |
| | AADNIIDAHLVNVHGKVLDRKSMGEDLFWALRGGGAESFGIIV | |
| | AWKIRLVAVPKSTMFSVKKIMEIHELVKLVNKWQNIAYKYDKD | |
| | LLLMTHFITRNITDNQGKNKTAIHTYFSSVFLGGVDSLVDLMNK | |
| | SFPELGIKKTDCRQLSWIDTIIFYSGVVNYDTDNFNKEILLDRSAG | |
| | QNGAFKIKLDYVKKPIPESVFVQILEKLYEEDIGAGMYALYPYG | |
| | GIMDEISESAIPFPHRAGILYELWYICSWEKQEDNEKHLNWIRNI | |
| | YNFMTPYVSQNPRLAYLNYRDLDIGINDPKNPNNYTQARIWGE | |
| | KYFGKNFDRLVKVKTLVDPNNFFRNEQSIPPLPPHRH | |
| PIR3_CB | NIQTSIANPRENFLKCFSQYIPNNATNLKLVYTQNNPLYMSVLNS | 185 |
| DAs_V73 | TIHNLRFSSDTTPKPLVIVTPSHVSHIQGTILCSKKVGLQIRTRSGG | |
| 6A | HDSEGMSYISQVPFVIVDLRNMRSIKIDVHSQTAWVEAGATLGE | |
| | VYYWVNEKNESLSLAAGYCPTVCAGGHFGGGGYGPLMRSYGL | |
| | AADNIIDAHLVNVHGKVLDRKSMGEDLFWALRGGGAESFGIIV | |
| | AWKIRLVAVPKSTMFSVKKIMEIHELVKLVNKWQNIAYKYDKD | |
| | LLLMTHFITRNITDNQGKNKTAIHTYFSSVFLGGVDSLVDLMNK | |
| | SFPELGIKKTDCRQLSWIDTIIFYSGVVNYDTDNFNKEILLDRSAG | |
| | QNGAFKIKLDYVKKPIPESVFVQILEKLYEEDIGAGMYALYPYG | |
| | GIMDEISESAIPFPHRAGILYELWYICSWEKQEDNEKHLNWIRNI | |
| | YNFMTPYVSQNPRLAYLNYRDLDIGINDPKNPNNYTQARIWGE | |
| | KYFGKNFDRLVKVKTLADPNNFFRNEQSIPPLPRHRH | |
| PIR3_CB | NIQTSIANPRENFLKCFSQYIPNNATNLKLVYTQNNPLYMSVLNS | 186 |
| DAs_A39 | TIHNLRFSSDTTPKPLVIVTPSHVSHIQGTILCSKKVGLQIRTRSGG | |
| 3V | HDSEGMSYISQVPFVIVDLRNMRSIKIDVHSQTAWVEAGATLGE | |
| | VYYWVNEKNESLSLAAGYCPTVCVGGHFGGGGYGPLMRSYGL | |
| | AADNIIDAHLVNVHGKVLDRKSMGEDLFWALRGGGAESFGIIV | |
| | AWKIRLVAVPKSTMFSVKKIMEIHELVKLVNKWQNIAYKYDKD | |
| | LLLMTHFITRNITDNQGKNKTAIHTYFSSVFLGGVDSLVDLMNK | |
| | SFPELGIKKTDCRQLSWIDTIIFYSGVVNYDTDNFNKEILLDRSAG | |
| | QNGAFKIKLDYVKKPIPESVFVQILEKLYEEDIGAGMYALYPYG | |
| | GIMDEISESAIPFPHRAGILYELWYICSWEKQEDNEKHLNWIRNI | |
| | YNFMTPYVSQNPRLAYLNYRDLDIGINDPKNPNNYTQARIWGE | |
| | KYFGKNFDRLVKVKTLVDPNNFFRNEQSIPPLPRHRH | |
| PIR3_CB | NIQTSIANPRENFLKCFSQYIPNNATNLKLVYTQNNPLYMSVLNS | 187 |
| DAs_S286 | TIHNLRFTSDTTPKPLVIVTPSHVSHIQGTILCSKKVGLQIRTRSGG | |
| T | HDSEGMSYISQVPFVIVDLRNMRSIKIDVHSQTAWVEAGATLGE | |
| | VYYWVNEKNESLSLAAGYCPTVCAGGHFGGGGYGPLMRSYGL | |
| | AADNIIDAHLVNVHGKVLDRKSMGEDLFWALRGGGAESFGIIV | |
| | AWKIRLVAVPKSTMFSVKKIMEIHELVKLVNKWQNIAYKYDKD | |
| | LLLMTHFITRNITDNQGKNKTAIHTYFSSVFLGGVDSLVDLMNK | |
| | SFPELGIKKTDCRQLSWIDTIIFYSGVVNYDTDNFNKEILLDRSAG | |
| | QNGAFKIKLDYVKKPIPESVFVQILEKLYEEDIGAGMYALYPYG | |
| | GIMDEISESAIPFPHRAGILYELWYICSWEKQEDNEKHLNWIRNI | |
| | YNFMTPYVSQNPRLAYLNYRDLDIGINDPKNPNNYTQARIWGE | |
| | KYFGKNFDRLVKVKTLVDPNNFFRNEQSIPPLPRHRH | |
| PIR3_CB | NIQTSIANPRENFLKCFSQYIPNNATNLKLVYTQNNPLYMSVLNS | 188 |
| DAs_D57 | TIHNLRFSSDTTPKPLVIVTPSHVSHIQGTILCSKKVGLQIRTRSGG | |
| 2N | HDSEGMSYISQVPFVIVDLRNMRSIKIDVHSQTAWVEAGATLGE | |
| | VYYWVNEKNESLSLAAGYCPTVCAGGHFGGGGYGPLMRSYGL | |
| | AADNIIDAHLVNVHGKVLDRKSMGEDLFWALRGGGAESFGIIV | |
| | AWKIRLVAVPKSTMFSVKKIMEIHELVKLVNKWQNIAYKYDKD | |
| | LLLMTHFITRNITDNQGKNKTAIHTYFSSVFLGGVDSLVDLMNK | |
| | SFPELGIKKTDCRQLSWIDTIIFYSGVVNYNTDNFNKEILLDRSAG | |
| | QNGAFKIKLDYVKKPIPESVFVQILEKLYEEDIGAGMYALYPYG | |
| | GIMDEISESAIPFPHRAGILYELWYICSWEKQEDNEKHLNWIRNI | |
| | YNFMTPYVSQNPRLAYLNYRDLDIGINDPKNPNNYTQARIWGE | |
| | KYFGKNFDRLVKVKTLVDPNNFFRNEQSIPPLPRHRH | |
| wild type | NIQTSIANPRENFLKCFSQYIPNNATNLKLVYTQNNPLYMSVLNS | 189 |
| control | TIHNLRFSSDTTPKPLVIVTPSHVSHIQGTILCSKKVGLQIRTRSGG | |
| construct | HDSEGMSYISQVPFVIVDLRNMRSIKIDVHSQTAWVEAGATLGE | |
| | VYYWVNEKNESLSLAAGYCPTVCAGGHFGGGGYGPLMRSYGL | |
| | AADNIIDAHLVNVHGKVLDRKSMGEDLFWALRGGGAESFGIIV | |
| | AWKIRLVAVPKSTMFSVKKIMEIHELVKLVNKWQNIAYKYDKD | |
| | LLLMTHFITRNITDNQGKNKTAIHTYFSSVFLGGVDSLVDLMNK | |
| | SFPELGIKKTDCRQLSWIDTIIFYSGVVNYDTDNFNKEILLDRSAG | |
| | QNGAFKIKLDYVKKPIPESVFVQILEKLYEEDIGAGMYALYPYG | |
| | GIMDEISESAIPFPHRAGILYELWYICSWEKQEDNEKHLNWIRNI | |
| | YNFMTPYVSQNPRLAYLNYRDLDIGINDPKNPNNYTQARIWGE | |
| | KYFGKNFDRLVKVKTLVDPNNFFRNEQSIPPLPRHRH | |
| PIR3_CB | NIQTSIANPRENFLKCFSQYIPNNATNLKLVYTQNNPLYMSVLNS | 190 |
| DAs_Q61 | TIHNLRFSSDTTPKPLVIVTPSHVSHIQGTILCSKKVGLQIRTRSGG | |
| 0K | HDSEGMSYISQVPFVIVDLRNMRSIKIDVHSQTAWVEAGATLGE | |
| | VYYWVNEKNESLSLAAGYCPTVCAGGHFGGGGYGPLMRSYGL | |
| | AADNIIDAHLVNVHGKVLDRKSMGEDLFWALRGGGAESFGIIV | |
| | AWKIRLVAVPKSTMFSVKKIMEIHELVKLVNKWQNIAYKYDKD | |
| | LLLMTHFITRNITDNQGKNKTAIHTYFSSVFLGGVDSLVDLMNK | |
| | SFPELGIKKTDCRQLSWIDTIIFYSGVVNYDTDNFNKEILLDRSAG | |
| | QNGAFKIKLDYVKKPIPESVFVKILEKLYEEDIGAGMYALYPYG | |
| | GIMDEISESAIPFPHRAGILYELWYICSWEKQEDNEKHLNWIRNI | |
| | YNFMTPYVSQNPRLAYLNYRDLDIGINDPKNPNNYTQARIWGE | |
| | KYFGKNFDRLVKVKTLVDPNNFFRNEQSIPPLPRHRH | |
| PIR3_CB | NIQTSIANPRENFLKCFSQYIPNNATNLKLVYTQNNPLYMSVLNS | 191 |
| DAs_G39 | TIHNLRFSSDTTPKPLVIVTPSHVSHIQGTILCSKKVGLQIRTRSGG | |
| 8S | HDSEGMSYISQVPFVIVDLRNMRSIKIDVHSQTAWVEAGATLGE | |
| | VYYWVNEKNESLSLAAGYCPTVCAGGHFSGGGYGPLMRSYGL | |
| | AADNIIDAHLVNVHGKVLDRKSMGEDLFWALRGGGAESFGIIV | |
| | AWKIRLVAVPKSTMFSVKKIMEIHELVKLVNKWQNIAYKYDKD | |
| | LLLMTHFITRNITDNQGKNKTAIHTYFSSVFLGGVDSLVDLMNK | |
| | SFPELGIKKTDCRQLSWIDTIIFYSGVVNYDTDNFNKEILLDRSAG | |
| | QNGAFKIKLDYVKKPIPESVFVQILEKLYEEDIGAGMYALYPYG | |
| | GIMDEISESAIPFPHRAGILYELWYICSWEKQEDNEKHLNWIRNI | |
| | YNFMTPYVSQNPRLAYLNYRDLDIGINDPKNPNNYTQARIWGE | |
| | KYFGKNFDRLVKVKTLVDPNNFFRNEQSIPPLPRHRH | |
| PIR3_CB | NIQTSIANPRENFLKCFSQYIPNNATNLKLVYTQNNPLYMSVLNS | 192 |
| DAs_L49 | TIHNLRFSSDTTPKPLVIVTPSHVSHIQGTILCSKKVGLQIRTRSGG | |
| 9V | HDSEGMSYISQVPFVIVDLRNMRSIKIDVHSQTAWVEAGATLGE | |
| | VYYWVNEKNESLSLAAGYCPTVCAGGHFGGGGYGPLMRSYGL | |
| | AADNIIDAHLVNVHGKVLDRKSMGEDLFWALRGGGAESFGIIV | |
| | AWKIRLVAVPKSTMFSVKKIMEIHELVKLVNKWQNIAYKYDKD | |
| | LVLMTHFITRNITDNQGKNKTAIHTYFSSVFLGGVDSLVDLMNK | |
| | SFPELGIKKTDCRQLSWIDTIIFYSGVVNYDTDNFNKEILLDRSAG | |
| | QNGAFKIKLDYVKKPIPESVFVQILEKLYEEDIGAGMYALYPYG | |
| | GIMDEISESAIPFPHRAGILYELWYICSWEKQEDNEKHLNWIRNI | |
| | YNFMTPYVSQNPRLAYLNYRDLDIGINDPKNPNNYTQARIWGE | |
| | KYFGKNFDRLVKVKTLVDPNNFFRNEQSIPPLPRHRH | |
| PIR3_CB | NIQTSIANPRENFLKCFSQYIPNNATNLKLVYTQNNPLYMSVLNS | 193 |
| DAs_Q51 | TIHNLRFSSDTTPKPLVIVTPSHVSHIQGTILCSKKVGLQIRTRSGG | |
| 3H | HDSEGMSYISQVPFVIVDLRNMRSIKIDVHSQTAWVEAGATLGE | |
| | VYYWVNEKNESLSLAAGYCPTVCAGGHFGGGGYGPLMRSYGL | |
| | AADNIIDAHLVNVHGKVLDRKSMGEDLFWALRGGGAESFGIIV | |
| | AWKIRLVAVPKSTMFSVKKIMEIHELVKLVNKWQNIAYKYDKD | |
| | LLLMTHFITRNITDNHGKNKTAIHTYFSSVFLGGVDSLVDLMNK | |
| | SFPELGIKKTDCRQLSWIDTIIFYSGVVNYDTDNFNKEILLDRSAG | |
| | QNGAFKIKLDYVKKPIPESVFVQILEKLYEEDIGAGMYALYPYG | |
| | GIMDEISESAIPFPHRAGILYELWYICSWEKQEDNEKHLNWIRNI | |
| | YNFMTPYVSQNPRLAYLNYRDLDIGINDPKNPNNYTQARIWGE | |
| | KYFGKNFDRLVKVKTLVDPNNFFRNEQSIPPLPRHRH | |
| PIR3_CB | NIQTSIANPRENFLKCFSQYIPNNATNLKLVYTQNNPLYMSVLNS | 194 |
| DAs_D57 | TIHNLRFSSDTTPKPLVIVTPSHVSHIQGTILCSKKVGLQIRTRSGG | |
| 4A | HDSEGMSYISQVPFVIVDLRNMRSIKIDVHSQTAWVEAGATLGE | |
| | VYYWVNEKNESLSLAAGYCPTVCAGGHFGGGGYGPLMRSYGL | |
| | AADNIIDAHLVNVHGKVLDRKSMGEDLFWALRGGGAESFGIIV | |
| | AWKIRLVAVPKSTMFSVKKIMEIHELVKLVNKWQNIAYKYDKD | |
| | LLLMTHFITRNITDNQGKNKTAIHTYFSSVFLGGVDSLVDLMNK | |
| | SFPELGIKKTDCRQLSWIDTIIFYSGVVNYDTANFNKEILLDRSAG | |
| | QNGAFKIKLDYVKKPIPESVFVQILEKLYEEDIGAGMYALYPYG | |
| | GIMDEISESAIPFPHRAGILYELWYICSWEKQEDNEKHLNWIRNI | |
| | YNFMTPYVSQNPRLAYLNYRDLDIGINDPKNPNNYTQARIWGE | |
| | KYFGKNFDRLVKVKTLVDPNNFFRNEQSIPPLPRHRH | |
| PIR3_CB | NIQTSIANPRENFLKCFSQYIPNNATNLKLVYTQNNPLYMSVLNS | 195 |
| DAs_L73 | TIHNLRFSSDTTPKPLVIVTPSHVSHIQGTILCSKKVGLQIRTRSGG | |
| 5K | HDSEGMSYISQVPFVIVDLRNMRSIKIDVHSQTAWVEAGATLGE | |
| | VYYWVNEKNESLSLAAGYCPTVCAGGHFGGGGYGPLMRSYGL | |
| | AADNIIDAHLVNVHGKVLDRKSMGEDLFWALRGGGAESFGIIV | |
| | AWKIRLVAVPKSTMFSVKKIMEIHELVKLVNKWQNIAYKYDKD | |
| | LLLMTHFITRNITDNQGKNKTAIHTYFSSVFLGGVDSLVDLMNK | |
| | SFPELGIKKTDCRQLSWIDTIIFYSGVVNYDTDNFNKEILLDRSAG | |
| | QNGAFKIKLDYVKKPIPESVFVQILEKLYEEDIGAGMYALYPYG | |
| | GIMDEISESAIPFPHRAGILYELWYICSWEKQEDNEKHLNWIRNI | |
| | YNFMTPYVSQNPRLAYLNYRDLDIGINDPKNPNNYTQARIWGE | |
| | KYFGKNFDRLVKVKTKVDPNNFFRNEQSIPPLPRHRH | |
| PIR3_CB | NIQTSIANPRENFLKCFSQYIPNNATNLKLVYTQNNPLYMSVLNS | 196 |
| DAs_N57 | TIHNLRFSSDTTPKPLVIVTPSHVSHIQGTILCSKKVGLQIRTRSGG | |
| 7K | HDSEGMSYISQVPFVIVDLRNMRSIKIDVHSQTAWVEAGATLGE | |
| | VYYWVNEKNESLSLAAGYCPTVCAGGHFGGGGYGPLMRSYGL | |
| | AADNIIDAHLVNVHGKVLDRKSMGEDLFWALRGGGAESFGIIV | |
| | AWKIRLVAVPKSTMFSVKKIMEIHELVKLVNKWQNIAYKYDKD | |
| | LLLMTHFITRNITDNQGKNKTAIHTYFSSVFLGGVDSLVDLMNK | |
| | SFPELGIKKTDCRQLSWIDTIIFYSGVVNYDTDNFKKEILLDRSAG | |
| | QNGAFKIKLDYVKKPIPESVFVQILEKLYEEDIGAGMYALYPYG | |
| | GIMDEISESAIPFPHRAGILYELWYICSWEKQEDNEKHLNWIRNI | |
| | YNFMTPYVSQNPRLAYLNYRDLDIGINDPKNPNNYTQARIWGE | |
| | KYFGKNFDRLVKVKTLVDPNNFFRNEQSIPPLPRHRH | |
| PIR3_CB | NIQTSIANPRENFLKCFSQYIPNNATNLKLVYTQNNPLYMSVLNS | 197 |
| DAs_Q58 | TIHNLRFSSDTTPKPLVIVTPSHVSHIQGTILCSKKVGLQIRTRSGG | |
| 8K | HDSEGMSYISQVPFVIVDLRNMRSIKIDVHSQTAWVEAGATLGE | |
| | VYYWVNEKNESLSLAAGYCPTVCAGGHFGGGGYGPLMRSYGL | |
| | AADNIIDAHLVNVHGKVLDRKSMGEDLFWALRGGGAESFGIIV | |
| | AWKIRLVAVPKSTMFSVKKIMEIHELVKLVNKWQNIAYKYDKD | |
| | LLLMTHFITRNITDNQGKNKTAIHTYFSSVFLGGVDSLVDLMNK | |
| | SFPELGIKKTDCRQLSWIDTIIFYSGVVNYDTDNFNKEILLDRSAG | |
| | KNGAFKIKLDYVKKPIPESVFVQILEKLYEEDIGAGMYALYPYG | |
| | GIMDEISESAIPFPHRAGILYELWYICSWEKQEDNEKHLNWIRNI | |
| | YNFMTPYVSQNPRLAYLNYRDLDIGINDPKNPNNYTQARIWGE | |
| | KYFGKNFDRLVKVKTLVDPNNFFRNEQSIPPLPRHRH | |
| PIR3_CB | NIQTSIANPRENFLKCFSQYIPNNATNLKLVYTQNNPLYMSVLNS | 198 |
| DAs_L38 | TIHNLRFSSDTTPKPLVIVTPSHVSHIQGTILCSKKVGLQIRTRSGG | |
| 3F | HDSEGMSYISQVPFVIVDLRNMRSIKIDVHSQTAWVEAGATLGE | |
| | VYYWVNEKNESLSFAAGYCPTVCAGGHFGGGGYGPLMRSYGL | |
| | AADNIIDAHLVNVHGKVLDRKSMGEDLFWALRGGGAESFGIIV | |
| | AWKIRLVAVPKSTMFSVKKIMEIHELVKLVNKWQNIAYKYDKD | |
| | LLLMTHFITRNITDNQGKNKTAIHTYFSSVFLGGVDSLVDLMNK | |
| | SFPELGIKKTDCRQLSWIDTIIFYSGVVNYDTDNFNKEILLDRSAG | |
| | QNGAFKIKLDYVKKPIPESVFVQILEKLYEEDIGAGMYALYPYG | |
| | GIMDEISESAIPFPHRAGILYELWYICSWEKQEDNEKHLNWIRNI | |
| | YNFMTPYVSQNPRLAYLNYRDLDIGINDPKNPNNYTQARIWGE | |
| | KYFGKNFDRLVKVKTLVDPNNFFRNEQSIPPLPRHRH | |
| PIR3_CB | NIQTSIANPRENFLKCFSQYIPNNAANLKLVYTQNNPLYMSVLNS | 199 |
| DAs_T25 | TIHNLRFSSDTTPKPLVIVTPSHVSHIQGTILCSKKVGLQIRTRSGG | |
| 9A | HDSEGMSYISQVPFVIVDLRNMRSIKIDVHSQTAWVEAGATLGE | |
| | VYYWVNEKNESLSLAAGYCPTVCAGGHFGGGGYGPLMRSYGL | |
| | AADNIIDAHLVNVHGKVLDRKSMGEDLFWALRGGGAESFGIIV | |
| | AWKIRLVAVPKSTMFSVKKIMEIHELVKLVNKWQNIAYKYDKD | |
| | LLLMTHFITRNITDNQGKNKTAIHTYFSSVFLGGVDSLVDLMNK | |
| | SFPELGIKKTDCRQLSWIDTIIFYSGVVNYDTDNFNKEILLDRSAG | |
| | QNGAFKIKLDYVKKPIPESVFVQILEKLYEEDIGAGMYALYPYG | |
| | GIMDEISESAIPFPHRAGILYELWYICSWEKQEDNEKHLNWIRNI | |
| | YNFMTPYVSQNPRLAYLNYRDLDIGINDPKNPNNYTQARIWGE | |
| | KYFGKNFDRLVKVKTLVDPNNFFRNEQSIPPLPRHRH | |
| PIR3_CB | NIQTSIANPRENFLKCFSQYIPNNATNLKLVYTQNNPLYMSVLNS | 200 |
| DAs_D63 | TIHNLRFSSDTTPKPLVIVTPSHVSHIQGTILCSKKVGLQIRTRSGG | |
| 5E | HDSEGMSYISQVPFVIVDLRNMRSIKIDVHSQTAWVEAGATLGE | |
| | VYYWVNEKNESLSLAAGYCPTVCAGGHFGGGGYGPLMRSYGL | |
| | AADNIIDAHLVNVHGKVLDRKSMGEDLFWALRGGGAESFGIIV | |
| | AWKIRLVAVPKSTMFSVKKIMEIHELVKLVNKWQNIAYKYDKD | |
| | LLLMTHFITRNITDNQGKNKTAIHTYFSSVFLGGVDSLVDLMNK | |
| | SFPELGIKKTDCRQLSWIDTIIFYSGVVNYDTDNFNKEILLDRSAG | |
| | QNGAFKIKLDYVKKPIPESVFVQILEKLYEEDIGAGMYALYPYG | |
| | GIMEEISESAIPFPHRAGILYELWYICSWEKQEDNEKHLNWIRNIY | |
| | NFMTPYVSQNPRLAYLNYRDLDIGINDPKNPNNYTQARIWGEK | |
| | YFGKNFDRLVKVKTLVDPNNFFRNEQSIPPLPRHRH | |
| PIR3_CB | NIQTSIANPRENFLKCFSQYIPNNATNLKLVYTQNNPLYMSVLNS | 201 |
| DAs_V52 | TIHNLRFSSDTTPKPLVIVTPSHVSHIQGTILCSKKVGLQIRTRSGG | |
| 7I | HDSEGMSYISQVPFVIVDLRNMRSIKIDVHSQTAWVEAGATLGE | |
| | VYYWVNEKNESLSLAAGYCPTVCAGGHFGGGGYGPLMRSYGL | |
| | AADNIIDAHLVNVHGKVLDRKSMGEDLFWALRGGGAESFGIIV | |
| | AWKIRLVAVPKSTMFSVKKIMEIHELVKLVNKWQNIAYKYDKD | |
| | LLLMTHFITRNITDNQGKNKTAIHTYFSSIFLGGVDSLVDLMNKS | |
| | FPELGIKKTDCRQLSWIDTIIFYSGVVNYDTDNFNKEILLDRSAG | |
| | QNGAFKIKLDYVKKPIPESVFVQILEKLYEEDIGAGMYALYPYG | |
| | GIMDEISESAIPFPHRAGILYELWYICSWEKQEDNEKHLNWIRNI | |
| | YNFMTPYVSQNPRLAYLNYRDLDIGINDPKNPNNYTQARIWGE | |
| | KYFGKNFDRLVKVKTLVDPNNFFRNEQSIPPLPRHRH | |
| PIR3_CB | NIQTSIANPRENFLKCFSQYIPNNATNLKLVYTQNNPLYMSVLNS | 202 |
| DAs_V37 | TIHNLRFSSDTTPKPLVIVTPSHVSHIQGTILCSKKVGLQIRTRSGG | |
| 4I | HDSEGMSYISQVPFVIVDLRNMRSIKIDVHSQTAWVEAGATLGE | |
| | VYYWINEKNESLSLAAGYCPTVCAGGHFGGGGYGPLMRSYGL | |
| | AADNIIDAHLVNVHGKVLDRKSMGEDLFWALRGGGAESFGIIV | |
| | AWKIRLVAVPKSTMFSVKKIMEIHELVKLVNKWQNIAYKYDKD | |
| | LLLMTHFITRNITDNQGKNKTAIHTYFSSVFLGGVDSLVDLMNK | |
| | SFPELGIKKTDCRQLSWIDTIIFYSGVVNYDTDNFNKEILLDRSAG | |
| | QNGAFKIKLDYVKKPIPESVFVQILEKLYEEDIGAGMYALYPYG | |
| | GIMDEISESAIPFPHRAGILYELWYICSWEKQEDNEKHLNWIRNI | |
| | YNFMTPYVSQNPRLAYLNYRDLDIGINDPKNPNNYTQARIWGE | |
| | KYFGKNFDRLVKVKTLVDPNNFFRNEQSIPPLPRHRH | |
| PIR3_CB | NIQTSIANPRENFLKCFSQYIPNNATNLKLVYTQNNPLYMSVLNS | 203 |
| DAs_R34 | TIHNLRFSSDTTPKPLVIVTPSHVSHIQGTILCSKKVGLQIRTRSGG | |
| 8H | HDSEGMSYISQVPFVIVDLRNMHSIKIDVHSQTAWVEAGATLGE | |
| | VYYWVNEKNESLSLAAGYCPTVCAGGHFGGGGYGPLMRSYGL | |
| | AADNIIDAHLVNVHGKVLDRKSMGEDLFWALRGGGAESFGIIV | |
| | AWKIRLVAVPKSTMFSVKKIMEIHELVKLVNKWQNIAYKYDKD | |
| | LLLMTHFITRNITDNQGKNKTAIHTYFSSVFLGGVDSLVDLMNK | |
| | SFPELGIKKTDCRQLSWIDTIIFYSGVVNYDTDNFNKEILLDRSAG | |
| | QNGAFKIKLDYVKKPIPESVFVQILEKLYEEDIGAGMYALYPYG | |
| | GIMDEISESAIPFPHRAGILYELWYICSWEKQEDNEKHLNWIRNI | |
| | YNFMTPYVSQNPRLAYLNYRDLDIGINDPKNPNNYTQARIWGE | |
| | KYFGKNFDRLVKVKTLVDPNNFFRNEQSIPPLPRHRH | |
| PIR3_CB | NIQTSIANPRENFLKCFSQYIPNNATNLKLVYTQNNPLYMSVLNS | 204 |
| DAs_S380 | TIHNLRFSSDTTPKPLVIVTPSHVSHIQGTILCSKKVGLQIRTRSGG | |
| N | HDSEGMSYISQVPFVIVDLRNMRSIKIDVHSQTAWVEAGATLGE | |
| | VYYWVNEKNENLSLAAGYCPTVCAGGHFGGGGYGPLMRSYGL | |
| | AADNIIDAHLVNVHGKVLDRKSMGEDLFWALRGGGAESFGIIV | |
| | AWKIRLVAVPKSTMFSVKKIMEIHELVKLVNKWQNIAYKYDKD | |
| | LLLMTHFITRNITDNQGKNKTAIHTYFSSVFLGGVDSLVDLMNK | |
| | SFPELGIKKTDCRQLSWIDTIIFYSGVVNYDTDNFNKEILLDRSAG | |
| | QNGAFKIKLDYVKKPIPESVFVQILEKLYEEDIGAGMYALYPYG | |
| | GIMDEISESAIPFPHRAGILYELWYICSWEKQEDNEKHLNWIRNI | |
| | YNFMTPYVSQNPRLAYLNYRDLDIGINDPKNPNNYTQARIWGE | |
| | KYFGKNFDRLVKVKTLVDPNNFFRNEQSIPPLPRHRH | |
| PIR3_CB | NIQTSIANPRENFLKCFSQYIPNNATNLKLVYTQNNPLYMSVLNS | 205 |
| DAs_S606 | TIHNLRFSSDTTPKPLVIVTPSHVSHIQGTILCSKKVGLQIRTRSGG | |
| T | HDSEGMSYISQVPFVIVDLRNMRSIKIDVHSQTAWVEAGATLGE | |
| | VYYWVNEKNESLSLAAGYCPTVCAGGHFGGGGYGPLMRSYGL | |
| | AADNIIDAHLVNVHGKVLDRKSMGEDLFWALRGGGAESFGIIV | |
| | AWKIRLVAVPKSTMFSVKKIMEIHELVKLVNKWQNIAYKYDKD | |
| | LLLMTHFITRNITDNQGKNKTAIHTYFSSVFLGGVDSLVDLMNK | |
| | SFPELGIKKTDCRQLSWIDTIIFYSGVVNYDTDNFNKEILLDRSAG | |
| | QNGAFKIKLDYVKKPIPETVFVQILEKLYEEDIGAGMYALYPYG | |
| | GIMDEISESAIPFPHRAGILYELWYICSWEKQEDNEKHLNWIRNI | |
| | YNFMTPYVSQNPRLAYLNYRDLDIGINDPKNPNNYTQARIWGE | |
| | KYFGKNFDRLVKVKTLVDPNNFFRNEQSIPPLPRHRH | |
| PIR3_CB | NIQTSIANPRENFLKCFSQYIPNNPTNLKLVYTQNNPLYMSVLNS | 206 |
| DAs_A25 | TIHNLRFSSDTTPKPLVIVTPSHVSHIQGTILCSKKVGLQIRTRSGG | |
| 8P | HDSEGMSYISQVPFVIVDLRNMRSIKIDVHSQTAWVEAGATLGE | |
| | VYYWVNEKNESLSLAAGYCPTVCAGGHFGGGGYGPLMRSYGL | |
| | AADNIIDAHLVNVHGKVLDRKSMGEDLFWALRGGGAESFGIIV | |
| | AWKIRLVAVPKSTMFSVKKIMEIHELVKLVNKWQNIAYKYDKD | |
| | LLLMTHFITRNITDNQGKNKTAIHTYFSSVFLGGVDSLVDLMNK | |
| | SFPELGIKKTDCRQLSWIDTIIFYSGVVNYDTDNFNKEILLDRSAG | |
| | QNGAFKIKLDYVKKPIPESVFVQILEKLYEEDIGAGMYALYPYG | |
| | GIMDEISESAIPFPHRAGILYELWYICSWEKQEDNEKHLNWIRNI | |
| | YNFMTPYVSQNPRLAYLNYRDLDIGINDPKNPNNYTQARIWGE | |
| | KYFGKNFDRLVKVKTLVDPNNFFRNEQSIPPLPRHRH | |
| PIR3_CB | NIQTSIANPRENFLKCFSQYIPNNATNLKLVYTQNNPLYMSVLNS | 207 |
| DAs_R50 | TIHNLRFSSDTTPKPLVIVTPSHVSHIQGTILCSKKVGLQIRTRSGG | |
| 7K | HDSEGMSYISQVPFVIVDLRNMRSIKIDVHSQTAWVEAGATLGE | |
| | VYYWVNEKNESLSLAAGYCPTVCAGGHFGGGGYGPLMRSYGL | |
| | AADNIIDAHLVNVHGKVLDRKSMGEDLFWALRGGGAESFGIIV | |
| | AWKIRLVAVPKSTMFSVKKIMEIHELVKLVNKWQNIAYKYDKD | |
| | LLLMTHFITKNITDNQGKNKTAIHTYFSSVFLGGVDSLVDLMNK | |
| | SFPELGIKKTDCRQLSWIDTIIFYSGVVNYDTDNFNKEILLDRSAG | |
| | QNGAFKIKLDYVKKPIPESVFVQILEKLYEEDIGAGMYALYPYG | |
| | GIMDEISESAIPFPHRAGILYELWYICSWEKQEDNEKHLNWIRNI | |
| | YNFMTPYVSQNPRLAYLNYRDLDIGINDPKNPNNYTQARIWGE | |
| | KYFGKNFDRLVKVKTLVDPNNFFRNEQSIPPLPRHRH | |
| PIR3_CB | NIQTSIANPRENFLKCFSQYIPNNATNLKLVYTQNNPLYMSVLNS | 208 |
| DAs_A38 | TIHNLRFSSDTTPKPLVIVTPSHVSHIQGTILCSKKVGLQIRTRSGG | |
| 4P | HDSEGMSYISQVPFVIVDLRNMRSIKIDVHSQTAWVEAGATLGE | |
| | VYYWVNEKNESLSLPAGYCPTVCAGGHFGGGGYGPLMRSYGL | |
| | AADNIIDAHLVNVHGKVLDRKSMGEDLFWALRGGGAESFGIIV | |
| | AWKIRLVAVPKSTMFSVKKIMEIHELVKLVNKWQNIAYKYDKD | |
| | LLLMTHFITRNITDNQGKNKTAIHTYFSSVFLGGVDSLVDLMNK | |
| | SFPELGIKKTDCRQLSWIDTIIFYSGVVNYDTDNFNKEILLDRSAG | |
| | QNGAFKIKLDYVKKPIPESVFVQILEKLYEEDIGAGMYALYPYG | |
| | GIMDEISESAIPFPHRAGILYELWYICSWEKQEDNEKHLNWIRNI | |
| | YNFMTPYVSQNPRLAYLNYRDLDIGINDPKNPNNYTQARIWGE | |
| | KYFGKNFDRLVKVKTLVDPNNFFRNEQSIPPLPRHRH | |
| PIR3_CB | NIQTSIANPRENFLKCFSQYIPNNATNLKLVYTQNNPLYMSVLNS | 209 |
| DAs_L67 | TIHNLRFSSDTTPKPLVIVTPSHVSHIQGTILCSKKVGLQIRTRSGG | |
| 0I | HDSEGMSYISQVPFVIVDLRNMRSIKIDVHSQTAWVEAGATLGE | |
| | VYYWVNEKNESLSLAAGYCPTVCAGGHFGGGGYGPLMRSYGL | |
| | AADNIIDAHLVNVHGKVLDRKSMGEDLFWALRGGGAESFGIIV | |
| | AWKIRLVAVPKSTMFSVKKIMEIHELVKLVNKWQNIAYKYDKD | |
| | LLLMTHFITRNITDNQGKNKTAIHTYFSSVFLGGVDSLVDLMNK | |
| | SFPELGIKKTDCRQLSWIDTIIFYSGVVNYDTDNFNKEILLDRSAG | |
| | QNGAFKIKLDYVKKPIPESVFVQILEKLYEEDIGAGMYALYPYG | |
| | GIMDEISESAIPFPHRAGILYELWYICSWEKQEDNEKHINWIRNIY | |
| | NFMTPYVSQNPRLAYLNYRDLDIGINDPKNPNNYTQARIWGEK | |
| | YFGKNFDRLVKVKTLVDPNNFFRNEQSIPPLPRHRH | |
| PIR3_CB | NIQTSIANPRENFLKCFSQYIPNNATNLKLVYTQNNPLYMSVLNS | 210 |
| DAs_S408 | TIHNLRFSSDTTPKPLVIVTPSHVSHIQGTILCSKKVGLQIRTRSGG | |
| N | HDSEGMSYISQVPFVIVDLRNMRSIKIDVHSQTAWVEAGATLGE | |
| | VYYWVNEKNESLSLAAGYCPTVCAGGHFGGGGYGPLMRNYGL | |
| | AADNIIDAHLVNVHGKVLDRKSMGEDLFWALRGGGAESFGIIV | |
| | AWKIRLVAVPKSTMFSVKKIMEIHELVKLVNKWQNIAYKYDKD | |
| | LLLMTHFITRNITDNQGKNKTAIHTYFSSVFLGGVDSLVDLMNK | |
| | SFPELGIKKTDCRQLSWIDTIIFYSGVVNYDTDNFNKEILLDRSAG | |
| | QNGAFKIKLDYVKKPIPESVFVQILEKLYEEDIGAGMYALYPYG | |
| | GIMDEISESAIPFPHRAGILYELWYICSWEKQEDNEKHLNWIRNI | |
| | YNFMTPYVSQNPRLAYLNYRDLDIGINDPKNPNNYTQARIWGE | |
| | KYFGKNFDRLVKVKTLVDPNNFFRNEQSIPPLPRHRH | |
| PIR3_CB | NIQTSIANPRENFLKCFSQYIPNNATNLKLVYTQNNPLYMSVLNS | 211 |
| DAs_T52 | TIHNLRFSSDTTPKPLVIVTPSHVSHIQGTILCSKKVGLQIRTRSGG | |
| 2G | HDSEGMSYISQVPFVIVDLRNMRSIKIDVHSQTAWVEAGATLGE | |
| | VYYWVNEKNESLSLAAGYCPTVCAGGHFGGGGYGPLMRSYGL | |
| | AADNIIDAHLVNVHGKVLDRKSMGEDLFWALRGGGAESFGIIV | |
| | AWKIRLVAVPKSTMFSVKKIMEIHELVKLVNKWQNIAYKYDKD | |
| | LLLMTHFITRNITDNQGKNKTAIHGYFSSVFLGGVDSLVDLMNK | |
| | SFPELGIKKTDCRQLSWIDTIIFYSGVVNYDTDNFNKEILLDRSAG | |
| | QNGAFKIKLDYVKKPIPESVFVQILEKLYEEDIGAGMYALYPYG | |
| | GIMDEISESAIPFPHRAGILYELWYICSWEKQEDNEKHLNWIRNI | |
| | YNFMTPYVSQNPRLAYLNYRDLDIGINDPKNPNNYTQARIWGE | |
| | KYFGKNFDRLVKVKTLVDPNNFFRNEQSIPPLPRHRH | |
| PIR3_CB | NIQTSIANPRENFLKCFSQYIPNNATNLKLVYTQHNPLYMSVLNS | 212 |
| DAs_N26 | TIHNLRFSSDTTPKPLVIVTPSHVSHIQGTILCSKKVGLQIRTRSGG | |
| 8H | HDSEGMSYISQVPFVIVDLRNMRSIKIDVHSQTAWVEAGATLGE | |
| | VYYWVNEKNESLSLAAGYCPTVCAGGHFGGGGYGPLMRSYGL | |
| | AADNIIDAHLVNVHGKVLDRKSMGEDLFWALRGGGAESFGIIV | |
| | AWKIRLVAVPKSTMFSVKKIMEIHELVKLVNKWQNIAYKYDKD | |
| | LLLMTHFITRNITDNQGKNKTAIHTYFSSVFLGGVDSLVDLMNK | |
| | SFPELGIKKTDCRQLSWIDTIIFYSGVVNYDTDNFNKEILLDRSAG | |
| | QNGAFKIKLDYVKKPIPESVFVQILEKLYEEDIGAGMYALYPYG | |
| | GIMDEISESAIPFPHRAGILYELWYICSWEKQEDNEKHLNWIRNI | |
| | YNFMTPYVSQNPRLAYLNYRDLDIGINDPKNPNNYTQARIWGE | |
| | KYFGKNFDRLVKVKTLVDPNNFFRNEQSIPPLPRHRH | |
| PIR3_CB | NIQTSIANPRENFLKCFSQYIPNNATNLKLVYTQNNPLYMSVLNS | 213 |
| DAs_V60 | TIHNLRFSSDTTPKPLVIVTPSHVSHIQGTILCSKKVGLQIRTRSGG | |
| 7A | HDSEGMSYISQVPFVIVDLRNMRSIKIDVHSQTAWVEAGATLGE | |
| | VYYWVNEKNESLSLAAGYCPTVCAGGHFGGGGYGPLMRSYGL | |
| | AADNIIDAHLVNVHGKVLDRKSMGEDLFWALRGGGAESFGIIV | |
| | AWKIRLVAVPKSTMFSVKKIMEIHELVKLVNKWQNIAYKYDKD | |
| | LLLMTHFITRNITDNQGKNKTAIHTYFSSVFLGGVDSLVDLMNK | |
| | SFPELGIKKTDCRQLSWIDTIIFYSGVVNYDTDNFNKEILLDRSAG | |
| | QNGAFKIKLDYVKKPIPESAFVQILEKLYEEDIGAGMYALYPYG | |
| | GIMDEISESAIPFPHRAGILYELWYICSWEKQEDNEKHLNWIRNI | |
| | YNFMTPYVSQNPRLAYLNYRDLDIGINDPKNPNNYTQARIWGE | |
| | KYFGKNFDRLVKVKTLVDPNNFFRNEQSIPPLPRHRH | |
| PIR3_CB | NIQTSIANPRENFLKCFSQYIPNNATNLKLVYTQNNPLYMSVLNS | 214 |
| DAs_N70 | TIHNLRFSSDTTPKPLVIVTPSHVSHIQGTILCSKKVGLQIRTRSGG | |
| 7S | HDSEGMSYISQVPFVIVDLRNMRSIKIDVHSQTAWVEAGATLGE | |
| | VYYWVNEKNESLSLAAGYCPTVCAGGHFGGGGYGPLMRSYGL | |
| | AADNIIDAHLVNVHGKVLDRKSMGEDLFWALRGGGAESFGIIV | |
| | AWKIRLVAVPKSTMFSVKKIMEIHELVKLVNKWQNIAYKYDKD | |
| | LLLMTHFITRNITDNQGKNKTAIHTYFSSVFLGGVDSLVDLMNK | |
| | SFPELGIKKTDCRQLSWIDTIIFYSGVVNYDTDNFNKEILLDRSAG | |
| | QNGAFKIKLDYVKKPIPESVFVQILEKLYEEDIGAGMYALYPYG | |
| | GIMDEISESAIPFPHRAGILYELWYICSWEKQEDNEKHLNWIRNI | |
| | YNFMTPYVSQNPRLAYLNYRDLDIGINDPKSPNNYTQARIWGEK | |
| | YFGKNFDRLVKVKTLVDPNNFFRNEQSIPPLPRHRH | |
| PIR3_CB | NIQTSIANPRENFLKCFSQYIPNNATNLKLVYTQNNPLYMSVLNS | 215 |
| DAs_I702 | TIHNLRFSSDTTPKPLVIVTPSHVSHIQGTILCSKKVGLQIRTRSGG | |
| K | HDSEGMSYISQVPFVIVDLRNMRSIKIDVHSQTAWVEAGATLGE | |
| | VYYWVNEKNESLSLAAGYCPTVCAGGHFGGGGYGPLMRSYGL | |
| | AADNIIDAHLVNVHGKVLDRKSMGEDLFWALRGGGAESFGIIV | |
| | AWKIRLVAVPKSTMFSVKKIMEIHELVKLVNKWQNIAYKYDKD | |
| | LLLMTHFITRNITDNQGKNKTAIHTYFSSVFLGGVDSLVDLMNK | |
| | SFPELGIKKTDCRQLSWIDTIIFYSGVVNYDTDNFNKEILLDRSAG | |
| | QNGAFKIKLDYVKKPIPESVFVQILEKLYEEDIGAGMYALYPYG | |
| | GIMDEISESAIPFPHRAGILYELWYICSWEKQEDNEKHLNWIRNI | |
| | YNFMTPYVSQNPRLAYLNYRDLDIGKNDPKNPNNYTQARIWGE | |
| | KYFGKNFDRLVKVKTLVDPNNFFRNEQSIPPLPRHRH | |
| PIR3_CB | NIQTSIANPRENFLKCFSQYIPNNATNLKLVYTQNNPLYMSVLNS | 216 |
| DAs_I520 | TIHNLRFSSDTTPKPLVIVTPSHVSHIQGTILCSKKVGLQIRTRSGG | |
| V | HDSEGMSYISQVPFVIVDLRNMRSIKIDVHSQTAWVEAGATLGE | |
| | VYYWVNEKNESLSLAAGYCPTVCAGGHFGGGGYGPLMRSYGL | |
| | AADNIIDAHLVNVHGKVLDRKSMGEDLFWALRGGGAESFGIIV | |
| | AWKIRLVAVPKSTMFSVKKIMEIHELVKLVNKWQNIAYKYDKD | |
| | LLLMTHFITRNITDNQGKNKTAVHTYFSSVFLGGVDSLVDLMNK | |
| | SFPELGIKKTDCRQLSWIDTIIFYSGVVNYDTDNFNKEILLDRSAG | |
| | QNGAFKIKLDYVKKPIPESVFVQILEKLYEEDIGAGMYALYPYG | |
| | GIMDEISESAIPFPHRAGILYELWYICSWEKQEDNEKHLNWIRNI | |
| | YNFMTPYVSQNPRLAYLNYRDLDIGINDPKNPNNYTQARIWGE | |
| | KYFGKNFDRLVKVKTLVDPNNFFRNEQSIPPLPRHRH | |
| PIR3_CB | NIQTSIANPRENFLKCFSQYIPNNATNLKLVYTQNNPLYMSVLNS | 217 |
| DAs_H30 | TIHNLRFSSDTTPKPLVIVTPSNVSHIQGTILCSKKVGLQIRTRSGG | |
| 1N | HDSEGMSYISQVPFVIVDLRNMRSIKIDVHSQTAWVEAGATLGE | |
| | VYYWVNEKNESLSLAAGYCPTVCAGGHFGGGGYGPLMRSYGL | |
| | AADNIIDAHLVNVHGKVLDRKSMGEDLFWALRGGGAESFGIIV | |
| | AWKIRLVAVPKSTMFSVKKIMEIHELVKLVNKWQNIAYKYDKD | |
| | LLLMTHFITRNITDNQGKNKTAIHTYFSSVFLGGVDSLVDLMNK | |
| | SFPELGIKKTDCRQLSWIDTIIFYSGVVNYDTDNFNKEILLDRSAG | |
| | QNGAFKIKLDYVKKPIPESVFVQILEKLYEEDIGAGMYALYPYG | |
| | GIMDEISESAIPFPHRAGILYELWYICSWEKQEDNEKHLNWIRNI | |
| | YNFMTPYVSQNPRLAYLNYRDLDIGINDPKNPNNYTQARIWGE | |
| | KYFGKNFDRLVKVKTLVDPNNFFRNEQSIPPLPRHRH | |
| PIR3_CB | NIQTSIANPRENFLKCFSQYIPNNATNLKLVYTQNNPLYMSVLNS | 218 |
| DAs_F608 | TIHNLRFSSDTTPKPLVIVTPSHVSHIQGTILCSKKVGLQIRTRSGG | |
| M | HDSEGMSYISQVPFVIVDLRNMRSIKIDVHSQTAWVEAGATLGE | |
| | VYYWVNEKNESLSLAAGYCPTVCAGGHFGGGGYGPLMRSYGL | |
| | AADNIIDAHLVNVHGKVLDRKSMGEDLFWALRGGGAESFGIIV | |
| | AWKIRLVAVPKSTMFSVKKIMEIHELVKLVNKWQNIAYKYDKD | |
| | LLLMTHFITRNITDNQGKNKTAIHTYFSSVFLGGVDSLVDLMNK | |
| | SFPELGIKKTDCRQLSWIDTIIFYSGVVNYDTDNFNKEILLDRSAG | |
| | QNGAFKIKLDYVKKPIPESVMVQILEKLYEEDIGAGMYALYPYG | |
| | GIMDEISESAIPFPHRAGILYELWYICSWEKQEDNEKHLNWIRNI | |
| | YNFMTPYVSQNPRLAYLNYRDLDIGINDPKNPNNYTQARIWGE | |
| | KYFGKNFDRLVKVKTLVDPNNFFRNEQSIPPLPRHRH | |
| PIR3_CB | NIQTSIANPRENFLKCFSQYIPNNATNLKLVYTQNNPLYMSVLNS | 219 |
| DAs_A51 | TIHNLRFSSDTTPKPLVIVTPSHVSHIQGTILCSKKVGLQIRTRSGG | |
| 9T | HDSEGMSYISQVPFVIVDLRNMRSIKIDVHSQTAWVEAGATLGE | |
| | VYYWVNEKNESLSLAAGYCPTVCAGGHFGGGGYGPLMRSYGL | |
| | AADNIIDAHLVNVHGKVLDRKSMGEDLFWALRGGGAESFGIIV | |
| | AWKIRLVAVPKSTMFSVKKIMEIHELVKLVNKWQNIAYKYDKD | |
| | LLLMTHFITRNITDNQGKNKTTIHTYFSSVFLGGVDSLVDLMNK | |
| | SFPELGIKKTDCRQLSWIDTIIFYSGVVNYDTDNFNKEILLDRSAG | |
| | QNGAFKIKLDYVKKPIPESVFVQILEKLYEEDIGAGMYALYPYG | |
| | GIMDEISESAIPFPHRAGILYELWYICSWEKQEDNEKHLNWIRNI | |
| | YNFMTPYVSQNPRLAYLNYRDLDIGINDPKNPNNYTQARIWGE | |
| | KYFGKNFDRLVKVKTLVDPNNFFRNEQSIPPLPRHRH | |
| PIR3_CB | NIQTSIANPRENFLKCFSQYIPNNATNLKLVYTQNNPLYMSVLNS | 220 |
| DAs_D72 | TIHNLRFSSDTTPKPLVIVTPSHVSHIQGTILCSKKVGLQIRTRSGG | |
| 7N | HDSEGMSYISQVPFVIVDLRNMRSIKIDVHSQTAWVEAGATLGE | |
| | VYYWVNEKNESLSLAAGYCPTVCAGGHFGGGGYGPLMRSYGL | |
| | AADNIIDAHLVNVHGKVLDRKSMGEDLFWALRGGGAESFGIIV | |
| | AWKIRLVAVPKSTMFSVKKIMEIHELVKLVNKWQNIAYKYDKD | |
| | LLLMTHFITRNITDNQGKNKTAIHTYFSSVFLGGVDSLVDLMNK | |
| | SFPELGIKKTDCRQLSWIDTIIFYSGVVNYDTDNFNKEILLDRSAG | |
| | QNGAFKIKLDYVKKPIPESVFVQILEKLYEEDIGAGMYALYPYG | |
| | GIMDEISESAIPFPHRAGILYELWYICSWEKQEDNEKHLNWIRNI | |
| | YNFMTPYVSQNPRLAYLNYRDLDIGINDPKNPNNYTQARIWGE | |
| | KYFGKNFNRLVKVKTLVDPNNFFRNEQSIPPLPRHRH | |
| PIR3_CB | NIQTSIANPRENFLKCFSQYIPNNATNLKLVYTQNNPLYMSVLNS | 221 |
| DAs_N58 | TIHNLRFSSDTTPKPLVIVTPSHVSHIQGTILCSKKVGLQIRTRSGG | |
| 9K | HDSEGMSYISQVPFVIVDLRNMRSIKIDVHSQTAWVEAGATLGE | |
| | VYYWVNEKNESLSLAAGYCPTVCAGGHFGGGGYGPLMRSYGL | |
| | AADNIIDAHLVNVHGKVLDRKSMGEDLFWALRGGGAESFGIIV | |
| | AWKIRLVAVPKSTMFSVKKIMEIHELVKLVNKWQNIAYKYDKD | |
| | LLLMTHFITRNITDNQGKNKTAIHTYFSSVFLGGVDSLVDLMNK | |
| | SFPELGIKKTDCRQLSWIDTIIFYSGVVNYDTDNFNKEILLDRSAG | |
| | QKGAFKIKLDYVKKPIPESVFVQILEKLYEEDIGAGMYALYPYG | |
| | GIMDEISESAIPFPHRAGILYELWYICSWEKQEDNEKHLNWIRNI | |
| | YNFMTPYVSQNPRLAYLNYRDLDIGINDPKNPNNYTQARIWGE | |
| | KYFGKNFDRLVKVKTLVDPNNFFRNEQSIPPLPRHRH | |
| PIR3_CB | NIQTSIANPRENFLKCFSQYIPNNATNLKLVYTQNNPLYMSVLNS | 222 |
| DAs_D70 | TIHNLRFSSDTTPKPLVIVTPSHVSHIQGTILCSKKVGLQIRTRSGG | |
| 4N | HDSEGMSYISQVPFVIVDLRNMRSIKIDVHSQTAWVEAGATLGE | |
| | VYYWVNEKNESLSLAAGYCPTVCAGGHFGGGGYGPLMRSYGL | |
| | AADNIIDAHLVNVHGKVLDRKSMGEDLFWALRGGGAESFGIIV | |
| | AWKIRLVAVPKSTMFSVKKIMEIHELVKLVNKWQNIAYKYDKD | |
| | LLLMTHFITRNITDNQGKNKTAIHTYFSSVFLGGVDSLVDLMNK | |
| | SFPELGIKKTDCRQLSWIDTIIFYSGVVNYDTDNFNKEILLDRSAG | |
| | QNGAFKIKLDYVKKPIPESVFVQILEKLYEEDIGAGMYALYPYG | |
| | GIMDEISESAIPFPHRAGILYELWYICSWEKQEDNEKHLNWIRNI | |
| | YNFMTPYVSQNPRLAYLNYRDLDIGINNPKNPNNYTQARIWGE | |
| | KYFGKNFDRLVKVKTLVDPNNFFRNEQSIPPLPRHRH | |
| PIR3_CB | NIQTSIANPRENFLKCFSQYIPNNATNLKLVYTQNNPLYMSVLNS | 223 |
| DAs_T30 | TIHNLRFSSDTTPKPLVIVTPSHVSHIQGSILCSKKVGLQIRTRSGG | |
| 8S | HDSEGMSYISQVPFVIVDLRNMRSIKIDVHSQTAWVEAGATLGE | |
| | VYYWVNEKNESLSLAAGYCPTVCAGGHFGGGGYGPLMRSYGL | |
| | AADNIIDAHLVNVHGKVLDRKSMGEDLFWALRGGGAESFGIIV | |
| | AWKIRLVAVPKSTMFSVKKIMEIHELVKLVNKWQNIAYKYDKD | |
| | LLLMTHFITRNITDNQGKNKTAIHTYFSSVFLGGVDSLVDLMNK | |
| | SFPELGIKKTDCRQLSWIDTIIFYSGVVNYDTDNFNKEILLDRSAG | |
| | QNGAFKIKLDYVKKPIPESVFVQILEKLYEEDIGAGMYALYPYG | |
| | GIMDEISESAIPFPHRAGILYELWYICSWEKQEDNEKHLNWIRNI | |
| | YNFMTPYVSQNPRLAYLNYRDLDIGINDPKNPNNYTQARIWGE | |
| | KYFGKNFDRLVKVKTLVDPNNFFRNEQSIPPLPRHRH | |
| PIR3_CB | NIQTSIANPRENFLKCFSQYIPNNATNLKLVYTQNNPLYMSVLNS | 224 |
| DAs_I657 | TIHNLRFSSDTTPKPLVIVTPSHVSHIQGTILCSKKVGLQIRTRSGG | |
| T | HDSEGMSYISQVPFVIVDLRNMRSIKIDVHSQTAWVEAGATLGE | |
| | VYYWVNEKNESLSLAAGYCPTVCAGGHFGGGGYGPLMRSYGL | |
| | AADNIIDAHLVNVHGKVLDRKSMGEDLFWALRGGGAESFGIIV | |
| | AWKIRLVAVPKSTMFSVKKIMEIHELVKLVNKWQNIAYKYDKD | |
| | LLLMTHFITRNITDNQGKNKTAIHTYFSSVFLGGVDSLVDLMNK | |
| | SFPELGIKKTDCRQLSWIDTIIFYSGVVNYDTDNFNKEILLDRSAG | |
| | QNGAFKIKLDYVKKPIPESVFVQILEKLYEEDIGAGMYALYPYG | |
| | GIMDEISESAIPFPHRAGILYELWYTCSWEKQEDNEKHLNWIRNI | |
| | YNFMTPYVSQNPRLAYLNYRDLDIGINDPKNPNNYTQARIWGE | |
| | KYFGKNFDRLVKVKTLVDPNNFFRNEQSIPPLPRHRH | |
| PIR3_CB | NIQTSIANPRENFLKCFSQYIPNNATNLKLVYTQNNPLYMSVLNS | 225 |
| DAs_V48 | TIHNLRFSSDTTPKPLVIVTPSHVSHIQGTILCSKKVGLQIRTRSGG | |
| 4F | HDSEGMSYISQVPFVIVDLRNMRSIKIDVHSQTAWVEAGATLGE | |
| | VYYWVNEKNESLSLAAGYCPTVCAGGHFGGGGYGPLMRSYGL | |
| | AADNIIDAHLVNVHGKVLDRKSMGEDLFWALRGGGAESFGIIV | |
| | AWKIRLVAVPKSTMFSVKKIMEIHELVKLFNKWQNIAYKYDKD | |
| | LLLMTHFITRNITDNQGKNKTAIHTYFSSVFLGGVDSLVDLMNK | |
| | SFPELGIKKTDCRQLSWIDTIIFYSGVVNYDTDNFNKEILLDRSAG | |
| | QNGAFKIKLDYVKKPIPESVFVQILEKLYEEDIGAGMYALYPYG | |
| | GIMDEISESAIPFPHRAGILYELWYICSWEKQEDNEKHLNWIRNI | |
| | YNFMTPYVSQNPRLAYLNYRDLDIGINDPKNPNNYTQARIWGE | |
| | KYFGKNFDRLVKVKTLVDPNNFFRNEQSIPPLPRHRH | |
| PIR3_CB | NIQTSIANPRENFLKCFSQYIPNNATNLKLVYTQNNPLYMSVLNS | 226 |
| DAs_I673 | TIHNLRFSSDTTPKPLVIVTPSHVSHIQGTILCSKKVGLQIRTRSGG | |
| V | HDSEGMSYISQVPFVIVDLRNMRSIKIDVHSQTAWVEAGATLGE | |
| | VYYWVNEKNESLSLAAGYCPTVCAGGHFGGGGYGPLMRSYGL | |
| | AADNIIDAHLVNVHGKVLDRKSMGEDLFWALRGGGAESFGIIV | |
| | AWKIRLVAVPKSTMFSVKKIMEIHELVKLVNKWQNIAYKYDKD | |
| | LLLMTHFITRNITDNQGKNKTAIHTYFSSVFLGGVDSLVDLMNK | |
| | SFPELGIKKTDCRQLSWIDTIIFYSGVVNYDTDNFNKEILLDRSAG | |
| | QNGAFKIKLDYVKKPIPESVFVQILEKLYEEDIGAGMYALYPYG | |
| | GIMDEISESAIPFPHRAGILYELWYICSWEKQEDNEKHLNWVRNI | |
| | YNFMTPYVSQNPRLAYLNYRDLDIGINDPKNPNNYTQARIWGE | |
| | KYFGKNFDRLVKVKTLVDPNNFFRNEQSIPPLPRHRH | |
| PIR3_CB | NIQTSIANPRENFLKCFSQYIPNNATNLKLVYTQNNPLYMSVLNS | 227 |
| DAs_A38 | TIHNLRFSSDTTPKPLVIVTPSHVSHIQGTILCSKKVGLQIRTRSGG | |
| 5G | HDSEGMSYISQVPFVIVDLRNMRSIKIDVHSQTAWVEAGATLGE | |
| | VYYWVNEKNESLSLAGGYCPTVCAGGHFGGGGYGPLMRSYGL | |
| | AADNIIDAHLVNVHGKVLDRKSMGEDLFWALRGGGAESFGIIV | |
| | AWKIRLVAVPKSTMFSVKKIMEIHELVKLVNKWQNIAYKYDKD | |
| | LLLMTHFITRNITDNQGKNKTAIHTYFSSVFLGGVDSLVDLMNK | |
| | SFPELGIKKTDCRQLSWIDTIIFYSGVVNYDTDNFNKEILLDRSAG | |
| | QNGAFKIKLDYVKKPIPESVFVQILEKLYEEDIGAGMYALYPYG | |
| | GIMDEISESAIPFPHRAGILYELWYICSWEKQEDNEKHLNWIRNI | |
| | YNFMTPYVSQNPRLAYLNYRDLDIGINDPKNPNNYTQARIWGE | |
| | KYFGKNFDRLVKVKTLVDPNNFFRNEQSIPPLPRHRH | |
| PIR3_CB | NIQTSIANPRENFLKCFSQYIPNNATNLKLVYTQNNPLYMSVLNS | 228 |
| DAs_I474 | TIHNLRFSSDTTPKPLVIVTPSHVSHIQGTILCSKKVGLQIRTRSGG | |
| N | HDSEGMSYISQVPFVIVDLRNMRSIKIDVHSQTAWVEAGATLGE | |
| | VYYWVNEKNESLSLAAGYCPTVCAGGHFGGGGYGPLMRSYGL | |
| | AADNIIDAHLVNVHGKVLDRKSMGEDLFWALRGGGAESFGIIV | |
| | AWKIRLVAVPKSTMFSVKKNMEIHELVKLVNKWQNIAYKYDK | |
| | DLLLMTHFITRNITDNQGKNKTAIHTYFSSVFLGGVDSLVDLMN | |
| | KSFPELGIKKTDCRQLSWIDTIIFYSGVVNYDTDNFNKEILLDRSA | |
| | GQNGAFKIKLDYVKKPIPESVFVQILEKLYEEDIGAGMYALYPY | |
| | GGIMDEISESAIPFPHRAGILYELWYICSWEKQEDNEKHLNWIRN | |
| | IYNFMTPYVSQNPRLAYLNYRDLDIGINDPKNPNNYTQARIWGE | |
| | KYFGKNFDRLVKVKTLVDPNNFFRNEQSIPPLPRHRH | |
| PIR3_CB | NIQTSIANPRENFLKCFSQYIPNNATNLKLVYTQNNPLYMSVLNS | 229 |
| DAs_A44 | TIHNLRFSSDTTPKPLVIVTPSHVSHIQGTILCSKKVGLQIRTRSGG | |
| 7G | HDSEGMSYISQVPFVIVDLRNMRSIKIDVHSQTAWVEAGATLGE | |
| | VYYWVNEKNESLSLAAGYCPTVCAGGHFGGGGYGPLMRSYGL | |
| | AADNIIDAHLVNVHGKVLDRKSMGEDLFWALRGGGGESFGIIV | |
| | AWKIRLVAVPKSTMFSVKKIMEIHELVKLVNKWQNIAYKYDKD | |
| | LLLMTHFITRNITDNQGKNKTAIHTYFSSVFLGGVDSLVDLMNK | |
| | SFPELGIKKTDCRQLSWIDTIIFYSGVVNYDTDNFNKEILLDRSAG | |
| | QNGAFKIKLDYVKKPIPESVFVQILEKLYEEDIGAGMYALYPYG | |
| | GIMDEISESAIPFPHRAGILYELWYICSWEKQEDNEKHLNWIRNI | |
| | YNFMTPYVSQNPRLAYLNYRDLDIGINDPKNPNNYTQARIWGE | |
| | KYFGKNFDRLVKVKTLVDPNNFFRNEQSIPPLPRHRH | |
| PIR3_CB | NIQTSIANPRENFLKCFSQYIPNNATNLKLVYTQNNPLYMSVLNS | 230 |
| DAs_L52 | TIHNLRFSSDTTPKPLVIVTPSHVSHIQGTILCSKKVGLQIRTRSGG | |
| 9H | HDSEGMSYISQVPFVIVDLRNMRSIKIDVHSQTAWVEAGATLGE | |
| | VYYWVNEKNESLSLAAGYCPTVCAGGHFGGGGYGPLMRSYGL | |
| | AADNIIDAHLVNVHGKVLDRKSMGEDLFWALRGGGAESFGIIV | |
| | AWKIRLVAVPKSTMFSVKKIMEIHELVKLVNKWQNIAYKYDKD | |
| | LLLMTHFITRNITDNQGKNKTAIHTYFSSVFHGGVDSLVDLMNK | |
| | SFPELGIKKTDCRQLSWIDTIIFYSGVVNYDTDNFNKEILLDRSAG | |
| | QNGAFKIKLDYVKKPIPESVFVQILEKLYEEDIGAGMYALYPYG | |
| | GIMDEISESAIPFPHRAGILYELWYICSWEKQEDNEKHLNWIRNI | |
| | YNFMTPYVSQNPRLAYLNYRDLDIGINDPKNPNNYTQARIWGE | |
| | KYFGKNFDRLVKVKTLVDPNNFFRNEQSIPPLPRHRH | |
| PIR3_CB | NIQTSIANPRENFLKCFSQYIPNNATNLKLVYTQNNPLYMSVLNS | 231 |
| DAs_M68 | TIHNLRFSSDTTPKPLVIVTPSHVSHIQGTILCSKKVGLQIRTRSGG | |
| 0T | HDSEGMSYISQVPFVIVDLRNMRSIKIDVHSQTAWVEAGATLGE | |
| | VYYWVNEKNESLSLAAGYCPTVCAGGHFGGGGYGPLMRSYGL | |
| | AADNIIDAHLVNVHGKVLDRKSMGEDLFWALRGGGAESFGIIV | |
| | AWKIRLVAVPKSTMFSVKKIMEIHELVKLVNKWQNIAYKYDKD | |
| | LLLMTHFITRNITDNQGKNKTAIHTYFSSVFLGGVDSLVDLMNK | |
| | SFPELGIKKTDCRQLSWIDTIIFYSGVVNYDTDNFNKEILLDRSAG | |
| | QNGAFKIKLDYVKKPIPESVFVQILEKLYEEDIGAGMYALYPYG | |
| | GIMDEISESAIPFPHRAGILYELWYICSWEKQEDNEKHLNWIRNI | |
| | YNFTTPYVSQNPRLAYLNYRDLDIGINDPKNPNNYTQARIWGEK | |
| | YFGKNFDRLVKVKTLVDPNNFFRNEQSIPPLPRHRH | |
| PIR3_CB | NIQTSIANPRENFLKCFSQYIPNNATNLKLVYTQNNQLYMSVLNS | 232 |
| DAs_P270 | TIHNLRFSSDTTPKPLVIVTPSHVSHIQGTILCSKKVGLQIRTRSGG | |
| Q | HDSEGMSYISQVPFVIVDLRNMRSIKIDVHSQTAWVEAGATLGE | |
| | VYYWVNEKNESLSLAAGYCPTVCAGGHFGGGGYGPLMRSYGL | |
| | AADNIIDAHLVNVHGKVLDRKSMGEDLFWALRGGGAESFGIIV | |
| | AWKIRLVAVPKSTMFSVKKIMEIHELVKLVNKWQNIAYKYDKD | |
| | LLLMTHFITRNITDNQGKNKTAIHTYFSSVFLGGVDSLVDLMNK | |
| | SFPELGIKKTDCRQLSWIDTIIFYSGVVNYDTDNFNKEILLDRSAG | |
| | QNGAFKIKLDYVKKPIPESVFVQILEKLYEEDIGAGMYALYPYG | |
| | GIMDEISESAIPFPHRAGILYELWYICSWEKQEDNEKHLNWIRNI | |
| | YNFMTPYVSQNPRLAYLNYRDLDIGINDPKNPNNYTQARIWGE | |
| | KYFGKNFDRLVKVKTLVDPNNFFRNEQSIPPLPRHRH | |
| PIR3_CB | NIQTSIANPRENFLKCFSQYIPNNATNLKLVYTQNNPLYMSVLNS | 233 |
| DAs_N70 | TIHNLRFSSDTTPKPLVIVTPSHVSHIQGTILCSKKVGLQIRTRSGG | |
| 3T | HDSEGMSYISQVPFVIVDLRNMRSIKIDVHSQTAWVEAGATLGE | |
| | VYYWVNEKNESLSLAAGYCPTVCAGGHFGGGGYGPLMRSYGL | |
| | AADNIIDAHLVNVHGKVLDRKSMGEDLFWALRGGGAESFGIIV | |
| | AWKIRLVAVPKSTMFSVKKIMEIHELVKLVNKWQNIAYKYDKD | |
| | LLLMTHFITRNITDNQGKNKTAIHTYFSSVFLGGVDSLVDLMNK | |
| | SFPELGIKKTDCRQLSWIDTIIFYSGVVNYDTDNFNKEILLDRSAG | |
| | QNGAFKIKLDYVKKPIPESVFVQILEKLYEEDIGAGMYALYPYG | |
| | GIMDEISESAIPFPHRAGILYELWYICSWEKQEDNEKHLNWIRNI | |
| | YNFMTPYVSQNPRLAYLNYRDLDIGITDPKNPNNYTQARIWGEK | |
| | YFGKNFDRLVKVKTLVDPNNFFRNEQSIPPLPRHRH | |
| PIR3_CB | NIQTSIANPRENFLKCFSQYIPNNATNLKLVYTQNNPLYMSVLNS | 234 |
| DAs_L55 | TIHNLRFSSDTTPKPLVIVTPSHVSHIQGTILCSKKVGLQIRTRSGG | |
| 6F | HDSEGMSYISQVPFVIVDLRNMRSIKIDVHSQTAWVEAGATLGE | |
| | VYYWVNEKNESLSLAAGYCPTVCAGGHFGGGGYGPLMRSYGL | |
| | AADNIIDAHLVNVHGKVLDRKSMGEDLFWALRGGGAESFGIIV | |
| | AWKIRLVAVPKSTMFSVKKIMEIHELVKLVNKWQNIAYKYDKD | |
| | LLLMTHFITRNITDNQGKNKTAIHTYFSSVFLGGVDSLVDLMNK | |
| | SFPELGIKKTDCRQFSWIDTIIFYSGVVNYDTDNFNKEILLDRSAG | |
| | QNGAFKIKLDYVKKPIPESVFVQILEKLYEEDIGAGMYALYPYG | |
| | GIMDEISESAIPFPHRAGILYELWYICSWEKQEDNEKHLNWIRNI | |
| | YNFMTPYVSQNPRLAYLNYRDLDIGINDPKNPNNYTQARIWGE | |
| | KYFGKNFDRLVKVKTLVDPNNFFRNEQSIPPLPRHRH | |
| PIR3_CB | NIQTSIANPRENFLKCFSQYIPNNATNLKLVYTQNNPLYMSVLNS | 235 |
| DAs_L38 | TIHNLRFSSDTTPKPLVIVTPSHVSHIQGTILCSKKVGLQIRTRSGG | |
| 1F | HDSEGMSYISQVPFVIVDLRNMRSIKIDVHSQTAWVEAGATLGE | |
| | VYYWVNEKNESFSLAAGYCPTVCAGGHFGGGGYGPLMRSYGL | |
| | AADNIIDAHLVNVHGKVLDRKSMGEDLFWALRGGGAESFGIIV | |
| | AWKIRLVAVPKSTMFSVKKIMEIHELVKLVNKWQNIAYKYDKD | |
| | LLLMTHFITRNITDNQGKNKTAIHTYFSSVFLGGVDSLVDLMNK | |
| | SFPELGIKKTDCRQLSWIDTIIFYSGVVNYDTDNFNKEILLDRSAG | |
| | QNGAFKIKLDYVKKPIPESVFVQILEKLYEEDIGAGMYALYPYG | |
| | GIMDEISESAIPFPHRAGILYELWYICSWEKQEDNEKHLNWIRNI | |
| | YNFMTPYVSQNPRLAYLNYRDLDIGINDPKNPNNYTQARIWGE | |
| | KYFGKNFDRLVKVKTLVDPNNFFRNEQSIPPLPRHRH | |
| PIR3_CB | NIQTSIANPRENFLKCFSQYIPNNATNLKLVYTQNNPLYMSVLNS | 236 |
| DAs_E47 | TIHNLRFSSDTTPKPLVIVTPSHVSHIQGTILCSKKVGLQIRTRSGG | |
| 9G | HDSEGMSYISQVPFVIVDLRNMRSIKIDVHSQTAWVEAGATLGE | |
| | VYYWVNEKNESLSLAAGYCPTVCAGGHFGGGGYGPLMRSYGL | |
| | AADNIIDAHLVNVHGKVLDRKSMGEDLFWALRGGGAESFGIIV | |
| | AWKIRLVAVPKSTMFSVKKIMEIHGLVKLVNKWQNIAYKYDKD | |
| | LLLMTHFITRNITDNQGKNKTAIHTYFSSVFLGGVDSLVDLMNK | |
| | SFPELGIKKTDCRQLSWIDTIIFYSGVVNYDTDNFNKEILLDRSAG | |
| | QNGAFKIKLDYVKKPIPESVFVQILEKLYEEDIGAGMYALYPYG | |
| | GIMDEISESAIPFPHRAGILYELWYICSWEKQEDNEKHLNWIRNI | |
| | YNFMTPYVSQNPRLAYLNYRDLDIGINDPKNPNNYTQARIWGE | |
| | KYFGKNFDRLVKVKTLVDPNNFFRNEQSIPPLPRHRH | |
| PIR3_CB | NIQTSIANPRENFLKCFSQYIPNNATNLKLVYTQNNPLYMSVLNS | 237 |
| DAs_I562 | TIHNLRFSSDTTPKPLVIVTPSHVSHIQGTILCSKKVGLQIRTRSGG | |
| T | HDSEGMSYISQVPFVIVDLRNMRSIKIDVHSQTAWVEAGATLGE | |
| | VYYWVNEKNESLSLAAGYCPTVCAGGHFGGGGYGPLMRSYGL | |
| | AADNIIDAHLVNVHGKVLDRKSMGEDLFWALRGGGAESFGIIV | |
| | AWKIRLVAVPKSTMFSVKKIMEIHELVKLVNKWQNIAYKYDKD | |
| | LLLMTHFITRNITDNQGKNKTAIHTYFSSVFLGGVDSLVDLMNK | |
| | SFPELGIKKTDCRQLSWIDTTIFYSGVVNYDTDNFNKEILLDRSA | |
| | GQNGAFKIKLDYVKKPIPESVFVQILEKLYEEDIGAGMYALYPY | |
| | GGIMDEISESAIPFPHRAGILYELWYICSWEKQEDNEKHLNWIRN | |
| | IYNFMTPYVSQNPRLAYLNYRDLDIGINDPKNPNNYTQARIWGE | |
| | KYFGKNFDRLVKVKTLVDPNNFFRNEQSIPPLPRHRH | |

TABLE 25
yCBGA_0523 mutant strains

| | First | | | Second | | | |
|---|---|---|---|---|---|---|---|
| | mutation | | | mutation | | | |
| | site on | | | site on | | | |
| | CBDAs | | | CBDAs | | | |
| | coding | | | coding | | | |
| | sequence | | | sequence | | | Average |
| | without | native | new | without | native | new | titer of |
| | the signal | amino | amino | the signal | amino | amino | CBDA |
| Constructs | sequence | acid | acid | sequence | acid | acid | mg/L |
| wild type control | wild type | N/A | N/A | N/A | N/A | N/A | 104.9 |
| construct | control | | | | | | |
| | construct | | | | | | |
| PIR3_CBDAS_G307A | 74 | G | A | N/A | N/A | N/A | 244.8 |
| PIR3_CBDAS_H425D | 192 | H | D | N/A | N/A | N/A | 199.5 |
| PIR3_CBDAS_I620V | 387 | I | V | N/A | N/A | N/A | 181.3 |
| PIR3_CBDAS_I676V | 443 | I | V | N/A | N/A | N/A | 155.6 |
| PIR3_CBDAS_I700L | 467 | I | L | N/A | N/A | N/A | 141.8 |
| PIR3_CBDAS_L442I | 209 | L | I | N/A | N/A | N/A | 169.6 |
| PIR3_CBDAS_M468I | 235 | M | I | N/A | N/A | N/A | 191.4 |
| PIR3_CBDAS_N269D | 36 | N | D | N/A | N/A | N/A | 210.6 |
| PIR3_CBDAS_P464P5 | 231 | P | PS | N/A | N/A | N/A | 201.3 |
| PIR3_CBDAS_R243Q | 10 | R | Q | N/A | N/A | N/A | 162.8 |
| PIR3_CBDAS_S328A | 95 | S | A | N/A | N/A | N/A | 125.2 |
| PIR3_CBDAS_S449N | 216 | S | N | N/A | N/A | N/A | 156.5 |
| PIR3_CBDAS_V454A | 221 | V | A | N/A | N/A | N/A | 145.6 |
| PIR3_CBDAS_Y571F | 338 | Y | F | N/A | N/A | N/A | 137.2 |
| PIR3_CBDAS_G307A_ | 74 | G | A | 192 | H | D | 371.8 |
| H425D | | | | | | | |
| PIR3_CBDAS_G307A_ | 74 | G | A | 387 | I | V | 373.2 |
| 1620V | | | | | | | |
| PIR3_CBDAS_G307A_ | 74 | G | A | 443 | I | V | 173.2 |
| I676V | | | | | | | |
| PIR3_CBDAS_G307A_ | 74 | G | A | 467 | I | L | 327.4 |
| 1700L | | | | | | | |
| PIR3_CBDAS_G307A_ | 74 | G | A | 209 | L | I | 353.6 |
| L442I | | | | | | | |
| PIR3_CBDAS_G307A_ | 74 | G | A | 235 | M | I | 391.7 |
| M468I | | | | | | | |
| PIR3_CBDAS_G307A_ | 74 | G | A | 36 | N | D | 281.2 |
| N269D | | | | | | | |
| PIR3_CBDAS_G307A_ | 74 | G | A | 231 | P | PS | 395.3 |
| P464PS | | | | | | | |
| PIR3_CBDAS_G307A_ | 74 | G | A | 10 | R | Q | 270.2 |
| R243Q | | | | | | | |
| PIR3_CBDAS_G307A_ | 74 | G | A | 95 | S | A | 306.8 |
| S328A | | | | | | | |
| PIR3_CBDAS_G307A_ | 74 | G | A | 216 | S | N | 346.8 |
| S449N | | | | | | | |
| PIR3_CBDAS_G307A_ | 74 | G | A | 221 | V | A | 314.2 |
| V454A | | | | | | | |
| PIR3_CBDAS_G307A_ | 74 | G | A | 338 | Y | F | 307.5 |
| Y571F | | | | | | | |
| PIR3_CBDAS_H425D_ | 192 | H | D | 235 | M | I | 324.1 |
| M468I | | | | | | | |
| PIR3_CBDAS_H425D_ | 192 | H | D | 36 | N | D | 351.5 |
| N269D | | | | | | | |
| PIR3_CBDAS_H425D_ | 192 | H | D | 221 | V | A | 277.8 |
| V454A | | | | | | | |
| PIR3_CBDAS_N269D_ | 36 | N | D | 235 | M | I | 332.8 |
| M468I | | | | | | | |
| PIR3_CBDAS_P464P5 | 231 | P | PS | 192 | H | D | 317.6 |
| H425D | | | | | | | |
| PIR3_CBDAS_P464P5 | 231 | P | PS | 36 | N | D | 348.0 |
| N269D | | | | | | | |
| PIR3_CBDAS_P464P5 | 231 | P | PS | 235 | M | I | 21.4 |
| T468I | | | | | | | |
| PIR3 CBDAS_P464PS | 231 | P | PS | 221 | V | A | 268.0 |
| V454A | | | | | | | |
| PIR3_CBDAS_S449N_ | 216 | S | N | 192 | H | D | 292.2 |
| H425D | | | | | | | |
| PIR3_CBDAS_S449N_I | 216 | S | N | 387 | I | V | 280.7 |
| 620V | | | | | | | |
| PIR3_CBDAS_S449N_I | 216 | S | N | 443 | I | V | 202.2 |
| 676V | | | | | | | |
| PIR3_CBDAS_S449N_I | 216 | S | N | 467 | I | L | 147.3 |
| 700L | | | | | | | |
| PIR3_CBDAS_S449N_ | 216 | S | N | 209 | L | I | 248.3 |
| L442I | | | | | | | |
| PIR3_CBDAS_S449N_ | 216 | S | N | 235 | M | I | 201.7 |
| M468I | | | | | | | |
| PIR3_CBDAS_S449N_ | 216 | S | N | 36 | N | D | 312.3 |
| N269D | | | | | | | |
| PIR3_CBDAS_S449N_ | 216 | S | N | 231 | P | PS | 238.2 |
| P464PS | | | | | | | |
| PIR3_CBDAS_S449N_ | 216 | S | N | 10 | R | Q | 229.1 |
| R243Q | | | | | | | |
| PIR3_CBDAS_S449N_ | 216 | S | N | 95 | S | A | 88.1 |
| S328A | | | | | | | |
| PIR3_CBDAS_S449N_ | 216 | S | N | 221 | V | A | 202.7 |
| V454A | | | | | | | |
| PIR3_CBDAS_S449N_ | 216 | S | N | 338 | Y | F | 148.7 |
| Y571F | | | | | | | |
| PIR3_CBDAS_V454A_ | 221 | V | A | 235 | M | I | 256.8 |
| M468I | | | | | | | |
| PIR3_CBDAS_V454A_ | 221 | V | A | 36 | N | D | 275.4 |
| N269D | | | | | | | |

TABLE 26
yCBGA_0523 mutant strains

| | | SEQ ID |
|---|---|---|
| Constructs | CBDA amino acid sequence | NO: |
| wild type | NIQTSIANPRENFLKCFSQYIPNNATNLKLVYTQNNPLYMSVLNSTIHN | 238 |
| control | LRFSSDTTPKPLVIVTPSHVSHIQGTILCSKKVGLQIRTRSGGHDSEGMS | |
| construct | YISQVPFVIVDLRNMRSIKIDVHSQTAWVEAGATLGEVYYWVNEKNES | |
| | LSLAAGYCPTVCAGGHFGGGGYGPLMRSYGLAADNIIDAHLVNVHGK | |
| | VLDRKSMGEDLFWALRGGGAESFGIIVAWKIRLVAVPKSTMFSVKKI | |
| | MEIHELVKLVNKWQNIAYKYDKDLLLMTHFITRNITDNQGKNKTAIHT | |
| | YFSSVFLGGVDSLVDLMNKSFPELGIKKTDCRQLSWIDTIIFYSGVVNY | |
| | DTDNFNKEILLDRSAGQNGAFKIKLDYVKKPIPESVFVQILEKLYEEDIG | |
| | AGMYALYPYGGIMDEISESAIPFPHRAGILYELWYICSWEKQEDNEKH | |
| | LNWIRNIYNFMTPYVSQNPRLAYLNYRDLDIGINDPKNPNNYTQARIW | |
| | GEKYFGKNFDRLVKVKTLVDPNNFFRNEQSIPPLPRHRH | |
| PIR3_ | NIQTSIANPRENFLKCFSQYIPNNATNLKLVYTQNNPLYMSVLNSTIHN | 239 |
| CBDAS_ | LRFSSDTTPKPLVIVTPSHVSHIQATILCSKKVGLQIRTRSGGHDSEGMS | |
| G307A | YISQVPFVIVDLRNMRSIKIDVHSQTAWVEAGATLGEVYYWVNEKNES | |
| | LSLAAGYCPTVCAGGHFGGGGYGPLMRSYGLAADNIIDAHLVNVHGK | |
| | VLDRKSMGEDLFWALRGGGAESFGIIVAWKIRLVAVPKSTMFSVKKI | |
| | MEIHELVKLVNKWQNIAYKYDKDLLLMTHFITRNITDNQGKNKTAIHT | |
| | YFSSVFLGGVDSLVDLMNKSFPELGIKKTDCRQLSWIDTIIFYSGVVNY | |
| | DTDNFNKEILLDRSAGQNGAFKIKLDYVKKPIPESVFVQILEKLYEEDIG | |
| | AGMYALYPYGGIMDEISESAIPFPHRAGILYELWYICSWEKQEDNEKH | |
| | LNWIRNIYNFMTPYVSQNPRLAYLNYRDLDIGINDPKNPNNYTQARIW | |
| | GEKYFGKNFDRLVKVKTLVDPNNIFFRNEQSIPPLPRHRH | |
| PIR3_ | NIQTSIANPRENFLKCFSQYIPNNATNLKLVYTQNNPLYMSVLNSTIHN | 240 |
| CBDAS_ | LRFSSDTTPKPLVIVTPSHVSHIQGTILCSKKVGLQIRTRSGGHDSEGMS | |
| H425D | YISQVPFVIVDLRNMRSIKIDVHSQTAWVEAGATLGEVYYWVNEKNES | |
| | LSLAAGYCPTVCAGGHFGGGGYGPLMRSYGLAADNIIDAHLVNVDGK | |
| | VLDRKSMGEDLFWALRGGGAESFGIIVAWKIRLVAVPKSTMFSVKKI | |
| | MEIHELVKLVNKWQNIAYKYDKDLLLMTHFITRNITDNQGKNKTAIHT | |
| | YFSSVFLGGVDSLVDLMNKSFPELGIKKTDCRQLSWIDTIIFYSGVVNY | |
| | DTDNFNKEILLDRSAGQNGAFKIKLDYVKKPIPESVFVQILEKLYEEDIG | |
| | AGMYALYPYGGIMDEISESAIPFPHRAGILYELWYICSWEKQEDNEKH | |
| | LNWIRNIYNFMTPYVSQNPRLAYLNYRDLDIGINDPKNPNNYTQARIW | |
| | GEKYFGKNFDRLVKVKTLVDPNNFFRNEQSIPPLPRHRH | |
| PIR3_CB | NIQTSIANPRENFLKCFSQYIPNNATNLKLVYTQNNPLYMSVLNSTIHN | 241 |
| DAS_I620 | LRFSSDTTPKPLVIVTPSHVSHIQGTILCSKKVGLQIRTRSGGHDSEGMS | |
| V | YISQVPFVIVDLRNMRSIKIDVHSQTAWVEAGATLGEVYYWVNEKNES | |
| | LSLAAGYCPTVCAGGHFGGGGYGPLMRSYGLAADNIIDAHLVNVHGK | |
| | VLDRKSMGEDLFWALRGGGAESFGIIVAWKIRLVAVPKSTMFSVKKI | |
| | MEIHELVKLVNKWQNIAYKYDKDLLLMTHFITRNITDNQGKNKTAIHT | |
| | YFSSVFLGGVDSLVDLMNKSFPELGIKKTDCRQLSWIDTIIFYSGVVNY | |
| | DTDNFNKEILLDRSAGQNGAFKIKLDYVKKPIPESVFVQILEKLYEEDV | |
| | GAGMYALYPYGGIMDEISESAIPFPHRAGILYELWYICSWEKQEDNEK | |
| | HLNWIRNIYNFMTPYVSQNPRLAYLNYRDLDIGINDPKNPNNYTQARI | |
| | WGEKYFGKNFDRLVKVKTLVDPNNFFRNEQSIPPLPRHRH | |
| PIR3_ | NIQTSIANPRENFLKCFSQYIPNNATNLKLVYTQNNPLYMSVLNSTIHN | 242 |
| CBDAS_ | LRFSSDTTPKPLVIVTPSHVSHIQGTILCSKKVGLQIRTRSGGHDSEGMS | |
| I676V | YISQVPFVIVDLRNMRSIKIDVHSQTAWVEAGATLGEVYYWVNEKNES | |
| | LSLAAGYCPTVCAGGHFGGGGYGPLMRSYGLAADNIIDAHLVNVHGK | |
| | VLDRKSMGEDLFWALRGGGAESFGIIVAWKIRLVAVPKSTMFSVKKI | |
| | MEIHELVKLVNKWQNIAYKYDKDLLLMTHFITRNITDNQGKNKTAIHT | |
| | YFSSVFLGGVDSLVDLMNKSFPELGIKKTDCRQLSWIDTIIFYSGVVNY | |
| | DTDNFNKEILLDRSAGQNGAFKIKLDYVKKPIPESVFVQILEKLYEEDIG | |
| | AGMYALYPYGGIMDEISESAIPFPHRAGILYELWYICSWEKQEDNEKH | |
| | LNWIRNVYNFMTPYVSQNPRLAYLNYRDLDIGINDPKNPNNYTQARI | |
| | WGEKYFGKNFDRLVKVKTLVDPNNFFRNEQSIPPLPRHRH | |
| PIR3_ | NIQTSIANPRENFLKCFSQYIPNNATNLKLVYTQNNPLYMSVLNSTIHN | 243 |
| CBDAS_ | LRFSSDTTPKPLVIVTPSHVSHIQGTILCSKKVGLQIRTRSGGHDSEGMS | |
| I700L | YISQVPFVIVDLRNMRSIKIDVHSQTAWVEAGATLGEVYYWVNEKNES | |
| | LSLAAGYCPTVCAGGHFGGGGYGPLMRSYGLAADNIIDAHLVNVHGK | |
| | VLDRKSMGEDLFWALRGGGAESFGIIVAWKIRLVAVPKSTMFSVKKI | |
| | MEIHELVKLVNKWQNIAYKYDKDLLLMTHFITRNITDNQGKNKTAIHT | |
| | YFSSVFLGGVDSLVDLMNKSFPELGIKKTDCRQLSWIDTIIFYSGVVNY | |
| | DTDNFNKEILLDRSAGQNGAFKIKLDYVKKPIPESVFVQILEKLYEEDIG | |
| | AGMYALYPYGGIMDEISESAIPFPHRAGILYELWYICSWEKQEDNEKH | |
| | LNWIRNIYNFMTPYVSQNPRLAYLNYRDLDLGINDPKNPNNYTQARIW | |
| | GEKYFGKNFDRLVKVKTLVDPNNFFRNEQSIPPLPRHRH | |
| PIR3_ | NIQTSIANPRENFLKCFSQYIPNNATNLKLVYTQNNPLYMSVLNSTIHN | 244 |
| CBDAS_ | LRFSSDTTPKPLVIVTPSHVSHIQGTILCSKKVGLQIRTRSGGHDSEGMS | |
| L442I | YISQVPFVIVDLRNMRSIKIDVHSQTAWVEAGATLGEVYYWVNEKNES | |
| | LSLAAGYCPTVCAGGHFGGGGYGPLMRSYGLAADNIIDAHLVNVHGK | |
| | VLDRKSMGEDLFWAIRGGGAESFGIIVAWKIRLVAVPKSTMFSVKKIM | |
| | EIHELVKLVNKWQNIAYKYDKDLLLMTHFITRNITDNQGKNKTAIHTY | |
| | FSSVFLGGVDSLVDLMNKSFPELGIKKTDCRQLSWIDTIIFYSGVVNYD | |
| | TDNFNKEILLDRSAGQNGAFKIKLDYVKKPIPESVFVQILEKLYEEDIGA | |
| | GMYALYPYGGIMDEISESAIPFPHRAGILYELWYICSWEKQEDNEKHL | |
| | NWIRNIYNFMTPYVSQNPRLAYLNYRDLDIGINDPKNPNNYTQARIWG | |
| | EKYFGKNFDRLVKVKTLVDPNNFFRNEQSIPPLPRHRH | |
| PIR3_ | NIQTSIANPRENFLKCFSQYIPNNATNLKLVYTQNNPLYMSVLNSTIHN | 245 |
| CBDAS_ | LRFSSDTTPKPLVIVTPSHVSHIQGTILCSKKVGLQIRTRSGGHDSEGMS | |
| M468I | YISQVPFVIVDLRNMRSIKIDVHSQTAWVEAGATLGEVYYWVNEKNES | |
| | LSLAAGYCPTVCAGGHFGGGGYGPLMRSYGLAADNIIDAHLVNVHGK | |
| | VLDRKSMGEDLFWALRGGGAESFGIIVAWKIRLVAVPKSTIFSVKKIM | |
| | EIHELVKLVNKWQNIAYKYDKDLLLMTHFITRNITDNQGKNKTAIHTY | |
| | FSSVFLGGVDSLVDLMNKSFPELGIKKTDCRQLSWIDTIIFYSGVVNYD | |
| | TDNFNKEILLDRSAGQNGAFKIKLDYVKKPIPESVFVQILEKLYEEDIGA | |
| | GMYALYPYGGIMDEISESAIPFPHRAGILYELWYICSWEKQEDNEKHL | |
| | NWIRNIYNFMTPYVSQNPRLAYLNYRDLDIGINDPKNPNNYTQARIWG | |
| | EKYFGKNFDRLVKVKTLVDPNNFFRNEQSIPPLPRHRH | |
| PIR3_ | NIQTSIANPRENFLKCFSQYIPNNATNLKLVYTQNDPLYMSVLNSTIHN | 246 |
| CBDAS_ | LRFSSDTTPKPLVIVTPSHVSHIQGTILCSKKVGLQIRTRSGGHDSEGMS | |
| N269D | YISQVPFVIVDLRNMRSIKIDVHSQTAWVEAGATLGEVYYWVNEKNES | |
| | LSLAAGYCPTVCAGGHFGGGGYGPLMRSYGLAADNIIDAHLVNVHGK | |
| | VLDRKSMGEDLFWALRGGGAESFGIIVAWKIRLVAVPKSTMFSVKKI | |
| | MEIHELVKLVNKWQNIAYKYDKDLLLMTHFITRNITDNQGKNKTAIHT | |
| | YFSSVFLGGVDSLVDLMNKSFPELGIKKTDCRQLSWIDTIIFYSGVVNY | |
| | DTDNFNKEILLDRSAGQNGAFKIKLDYVKKPIPESVFVQILEKLYEEDIG | |
| | AGMYALYPYGGIMDEISESAIPFPHRAGILYELWYICSWEKQEDNEKH | |
| | LNWIRNIYNFMTPYVSQNPRLAYLNYRDLDIGINDPKNPNNYTQARIW | |
| | GEKYFGKNFDRLVKVKTLVDPNNFFRNEQSIPPLPRHRH | |
| PIR3_ | NIQTSIANPRENFLKCFSQYIPNNATNLKLVYTQNNPLYMSVLNSTIHN | 247 |
| CBDAS_ | LRFSSDTTPKPLVIVTPSHVSHIQGTILCSKKVGLQIRTRSGGHDSEGMS | |
| P464PS | YISQVPFVIVDLRNMRSIKIDVHSQTAWVEAGATLGEVYYWVNEKNES | |
| | LSLAAGYCPTVCAGGHFGGGGYGPLMRSYGLAADNIIDAHLVNVHGK | |
| | VLDRKSMGEDLFWALRGGGAESFGIIVAWKIRLVAVPSKSTMFSVKKI | |
| | MEIHELVKLVNKWQNIAYKYDKDLLLMTHFITRNITDNQGKNKTAIHT | |
| | YFSSVFLGGVDSLVDLMNKSFPELGIKKTDCRQLSWIDTIIFYSGVVNY | |
| | DTDNFNKEILLDRSAGQNGAFKIKLDYVKKPIPESVFVQILEKLYEEDIG | |
| | AGMYALYPYGGIMDEISESAIPFPHRAGILYELWYICSWEKQEDNEKH | |
| | LNWIRNIYNFMTPYVSQNPRLAYLNYRDLDIGINDPKNPNNYTQARIW | |
| | GEKYFGKNFDRLVKVKTLVDPNNFFRNEQSIPPLPRHRH | |
| PIR3_ | NIQTSIANPQENFLKCFSQYIPNNATNLKLVYTQNNPLYMSVLNSTIHN | 248 |
| CBDAS_ | LRFSSDTTPKPLVIVTPSHVSHIQGTILCSKKVGLQIRTRSGGHDSEGMS | |
| R243Q | YISQVPFVIVDLRNMRSIKIDVHSQTAWVEAGATLGEVYYWVNEKNES | |
| | LSLAAGYCPTVCAGGHFGGGGYGPLMRSYGLAADNIIDAHLVNVHGK | |
| | VLDRKSMGEDLFWALRGGGAESFGIIVAWKIRLVAVPKSTMFSVKKI | |
| | MEIHELVKLVNKWQNIAYKYDKDLLLMTHFITRNITDNQGKNKTAIHT | |
| | YFSSVFLGGVDSLVDLMNKSFPELGIKKTDCRQLSWIDTIIFYSGVVNY | |
| | DTDNFNKEILLDRSAGQNGAFKIKLDYVKKPIPESVFVQILEKLYEEDIG | |
| | AGMYALYPYGGIMDEISESAIPFPHRAGILYELWYICSWEKQEDNEKH | |
| | LNWIRNIYNFMTPYVSQNPRLAYLNYRDLDIGINDPKNPNNYTQARIW | |
| | GEKYFGKNFDRLVKVKTLVDPNNFFRNEQSIPPLPRHRH | |
| PIR3_ | NIQTSIANPRENFLKCFSQYIPNNATNLKLVYTQNNPLYMSVLNSTIHN | 249 |
| CBDAS- | LRFSSDTTPKPLVIVTPSHVSHIQGTILCSKKVGLQIRTRSGGHDAEGMS | |
| S328A | YISQVPFVIVDLRNMRSIKIDVHSQTAWVEAGATLGEVYYWVNEKNES | |
| | LSLAAGYCPTVCAGGHFGGGGYGPLMRSYGLAADNIIDAHLVNVHGK | |
| | VLDRKSMGEDLFWALRGGGAESFGIIVAWKIRLVAVPKSTMFSVKKI | |
| | MEIHELVKLVNKWQNIAYKYDKDLLLMTHFITRNITDNQGKNKTAIHT | |
| | YFSSVFLGGVDSLVDLMNKSFPELGIKKTDCRQLSWIDTIIFYSGVVNY | |
| | DTDNFNKEILLDRSAGQNGAFKIKLDYVKKPIPESVFVQILEKLYEEDIG | |
| | AGMYALYPYGGIMDEISESAIPFPHRAGILYELWYICSWEKQEDNEKH | |
| | LNWIRNIYNFMTPYVSQNPRLAYLNYRDLDIGINDPKNPNNYTQARIW | |
| | GEKYFGKNFDRLVKVKTLVDPNNFFRNEQSIPPLPRHRH | |
| PIR3_ | NIQTSIANPRENFLKCFSQYIPNNATNLKLVYTQNNPLYMSVLNSTIHN | 250 |
| CBDAS_ | LRFSSDTTPKPLVIVTPSHVSHIQGTILCSKKVGLQIRTRSGGHDSEGMS | |
| S449N | YISQVPFVIVDLRNMRSIKIDVHSQTAWVEAGATLGEVYYWVNEKNES | |
| | LSLAAGYCPTVCAGGHFGGGGYGPLMRSYGLAADNIIDAHLVNVHGK | |
| | VLDRKSMGEDLFWALRGGGAENFGIIVAWKIRLVAVPKSTMFSVKKI | |
| | MEIHELVKLVNKWQNIAYKYDKDLLLMTHFITRNITDNQGKNKTAIHT | |
| | YFSSVFLGGVDSLVDLMNKSFPELGIKKTDCRQLSWIDTIIFYSGVVNY | |
| | DTDNFNKEILLDRSAGQNGAFKIKLDYVKKPIPESVFVQILEKLYEEDIG | |
| | AGMYALYPYGGIMDEISESAIPFPHRAGILYELWYICSWEKQEDNEKH | |
| | LNWIRNIYNFMTPYVSQNPRLAYLNYRDLDIGINDPKNPNNYTQARIW | |
| | GEKYFGKNFDRLVKVKTLVDPNNFFRNEQSIPPLPRHRH | |
| PIR3_ | NIQTSIANPRENFLKCFSQYIPNNATNLKLVYTQNNPLYMSVLNSTIHN | 251 |
| CBDAS_ | LRFSSDTTPKPLVIVTPSHVSHIQGTILCSKKVGLQIRTRSGGHDSEGMS | |
| V454A | YISQVPFVIVDLRNMRSIKIDVHSQTAWVEAGATLGEVYYWVNEKNES | |
| | LSLAAGYCPTVCAGGHFGGGGYGPLMRSYGLAADNIIDAHLVNVHGK | |
| | VLDRKSMGEDLFWALRGGGAESFGIIAAWKIRLVAVPKSTMFSVKKI | |
| | MEIHELVKLVNKWQNIAYKYDKDLLLMTHFITRNITDNQGKNKTAIHT | |
| | YFSSVFLGGVDSLVDLMNKSFPELGIKKTDCRQLSWIDTIIFYSGVVNY | |
| | DTDNFNKEILLDRSAGQNGAFKIKLDYVKKPIPESVFVQILEKLYEEDIG | |
| | AGMYALYPYGGIMDEISESAIPFPHRAGILYELWYICSWEKQEDNEKH | |
| | LNWIRNIYNFMTPYVSQNPRLAYLNYRDLDIGINDPKNPNNYTQARIW | |
| | GEKYFGKNFDRLVKVKTLVDPNNFFRNEQSIPPLPRHRH | |
| PIR3_ | NIQTSIANPRENFLKCFSQYIPNNATNLKLVYTQNNPLYMSVLNSTIHN | 252 |
| CBDAS_ | LRFSSDTTPKPLVIVTPSHVSHIQGTILCSKKVGLQIRTRSGGHDSEGMS | |
| Y571F | YISQVPFVIVDLRNMRSIKIDVHSQTAWVEAGATLGEVYYWVNEKNES | |
| | LSLAAGYCPTVCAGGHFGGGGYGPLMRSYGLAADNIIDAHLVNVHGK | |
| | VLDRKSMGEDLFWALRGGGAESFGIIVAWKIRLVAVPKSTMFSVKKI | |
| | MEIHELVKLVNKWQNIAYKYDKDLLLMTHFITRNITDNQGKNKTAIHT | |
| | YFSSVFLGGVDSLVDLMNKSFPELGIKKTDCRQLSWIDTIIFYSGVVNF | |
| | DTDNFNKEILLDRSAGQNGAFKIKLDYVKKPIPESVFVQILEKLYEEDIG | |
| | AGMYALYPYGGIMDEISESAIPFPHRAGILYELWYICSWEKQEDNEKH | |
| | LNWIRNIYNFMTPYVSQNPRLAYLNYRDLDIGINDPKNPNNYTQARIW | |
| | GEKYFGKNFDRLVKVKTLVDPNNFFRNEQSIPPLPRHRH | |
| PIR3_ | NIQTSIANPRENFLKCFSQYIPNNATNLKLVYTQNNPLYMSVLNSTIHN | 253 |
| CBDAS_ | LRFSSDTTPKPLVIVTPSHVSHIQATILCSKKVGLQIRTRSGGHDSEGMS | |
| G307A_ | YISQVPFVIVDLRNMRSIKIDVHSQTAWVEAGATLGEVYYWVNEKNES | |
| H425D | LSLAAGYCPTVCAGGHFGGGGYGPLMRSYGLAADNIIDAHLVNVDGK | |
| | VLDRKSMGEDLFWALRGGGAESFGIIVAWKIRLVAVPKSTMFSVKKI | |
| | MEIHELVKLVNKWQNIAYKYDKDLLLMTHFITRNITDNQGKNKTAIHT | |
| | YFSSVFLGGVDSLVDLMNKSFPELGIKKTDCRQLSWIDTIIFYSGVVNY | |
| | DTDNFNKEILLDRSAGQNGAFKIKLDYVKKPIPESVFVQILEKLYEEDIG | |
| | AGMYALYPYGGIMDEISESAIPFPHRAGILYELWYICSWEKQEDNEKH | |
| | LNWIRNIYNFMTPYVSQNPRLAYLNYRDLDIGINDPKNPNNYTQARIW | |
| | GEKYFGKNFDRLVKVKTLVDPNNFFRNEQSIPPLPRHRH | |
| PIR3_ | NIQTSIANPRENFLKCFSQYIPNNATNLKLVYTQNNPLYMSVLNSTIHN | 254 |
| CBDAS_ | LRFSSDTTPKPLVIVTPSHVSHIQATILCSKKVGLQIRTRSGGHDSEGMS | |
| G307A_I620V | YISQVPFVIVDLRNMRSIKIDVHSQTAWVEAGATLGEVYYWVNEKNES | |
| | LSLAAGYCPTVCAGGHFGGGGYGPLMRSYGLAADNIIDAHLVNVHGK | |
| | VLDRKSMGEDLFWALRGGGAESFGIIVAWKIRLVAVPKSTMFSVKKI | |
| | MEIHELVKLVNKWQNIAYKYDKDLLLMTHFITRNITDNQGKNKTAIHT | |
| | YFSSVFLGGVDSLVDLMNKSFPELGIKKTDCRQLSWIDTIIFYSGVVNY | |
| | DTDNFNKEILLDRSAGQNGAFKIKLDYVKKPIPESVFVQILEKLYEEDV | |
| | GAGMYALYPYGGIMDEISESAIPFPHRAGILYELWYICSWEKQEDNEK | |
| | HLNWIRNIYNFMTPYVSQNPRLAYLNYRDLDIGINDPKNPNNYTQARI | |
| | WGEKYFGKNFDRLVKVKTLVDPNNFFRNEQSIPPLPRHRH | |
| PIR3_ | NIQTSIANPRENFLKCFSQYIPNNATNLKLVYTQNNPLYMSVLNSTIHN | 255 |
| CBDAS_ | LRFSSDTTPKPLVIVTPSHVSHIQATILCSKKVGLQIRTRSGGHDSEGMS | |
| G307A_I676V | YISQVPFVIVDLRNMRSIKIDVHSQTAWVEAGATLGEVYYWVNEKNES | |
| | LSLAAGYCPTVCAGGHFGGGGYGPLMRSYGLAADNIIDAHLVNVHGK | |
| | VLDRKSMGEDLFWALRGGGAESFGIIVAWKIRLVAVPKSTMFSVKKI | |
| | MEIHELVKLVNKWQNIAYKYDKDLLLMTHFITRNITDNQGKNKTAIHT | |
| | YFSSVFLGGVDSLVDLMNKSFPELGIKKTDCRQLSWIDTIIFYSGVVNY | |
| | DTDNFNKEILLDRSAGQNGAFKIKLDYVKKPIPESVFVQILEKLYEEDIG | |
| | AGMYALYPYGGIMDEISESAIPFPHRAGILYELWYICSWEKQEDNEKH | |
| | LNWIRNVYNFMTPYVSQNPRLAYLNYRDLDIGINDPKNPNNYTQARI | |
| | WGEKYFGKNFDRLVKVKTLVDPNNFFRNEQSIPPLPRHRH | |
| PIR3_ | NIQTSIANPRENFLKCFSQYIPNNATNLKLVYTQNNPLYMSVLNSTIHN | 256 |
| CBDAS_ | LRFSSDTTPKPLVIVTPSHVSHIQATILCSKKVGLQIRTRSGGHDSEGMS | |
| G307A_I700L | YISQVPFVIVDLRNMRSIKIDVHSQTAWVEAGATLGEVYYWVNEKNES | |
| | LSLAAGYCPTVCAGGHFGGGGYGPLMRSYGLAADNIIDAHLVNVHGK | |
| | VLDRKSMGEDLFWALRGGGAESFGIIVAWKIRLVAVPKSTMFSVKKI | |
| | MEIHELVKLVNKWQNIAYKYDKDLLLMTHFITRNITDNQGKNKTAIHT | |
| | YFSSVFLGGVDSLVDLMNKSFPELGIKKTDCRQLSWIDTIIFYSGVVNY | |
| | DTDNFNKEILLDRSAGQNGAFKIKLDYVKKPIPESVFVQILEKLYEEDIG | |
| | AGMYALYPYGGIMDEISESAIPFPHRAGILYELWYICSWEKQEDNEKH | |
| | LNWIRNIYNFMTPYVSQNPRLAYLNYRDLDLGINDPKNPNNYTQARIW | |
| | GEKYFGKNFDRLVKVKTLVDPNNFFRNEQSIPPLPRHRH | |
| PIR3_ | NIQTSIANPRENFLKCFSQYIPNNATNLKLVYTQNNPLYMSVLNSTIHN | 257 |
| CBDAS_ | LRFSSDTTPKPLVIVTPSHVSHIQATILCSKKVGLQIRTRSGGHDSEGMS | |
| G307A_L442I | YISQVPFVIVDLRNMRSIKIDVHSQTAWVEAGATLGEVYYWVNEKNES | |
| | LSLAAGYCPTVCAGGHFGGGGYGPLMRSYGLAADNIIDAHLVNVHGK | |
| | VLDRKSMGEDLFWAIRGGGAESFGIIVAWKIRLVAVPKSTMFSVKKIM | |
| | EIHELVKLVNKWQNIAYKYDKDLLLMTHFITRNITDNQGKNKTAIHTY | |
| | FSSVFLGGVDSLVDLMNKSFPELGIKKTDCRQLSWIDTIIFYSGVVNYD | |
| | TDNFNKEILLDRSAGQNGAFKIKLDYVKKPIPESVFVQILEKLYEEDIGA | |
| | GMYALYPYGGIMDEISESAIPFPHRAGILYELWYICSWEKQEDNEKHL | |
| | NWIRNIYNFMTPYVSQNPRLAYLNYRDLDIGINDPKNPNNYTQARIWG | |
| | EKYFGKNFDRLVKVKTLVDPNNFFRNEQSIPPLPRHRH | |
| PIR3_ | NIQTSIANPRENFLKCFSQYIPNNATNLKLVYTQNNPLYMSVLNSTIHN | 258 |
| CBDAS_ | LRFSSDTTPKPLVIVTPSHVSHIQATILCSKKVGLQIRTRSGGHDSEGMS | |
| G307A_M468I | YISQVPFVIVDLRNMRSIKIDVHSQTAWVEAGATLGEVYYWVNEKNES | |
| | LSLAAGYCPTVCAGGHFGGGGYGPLMRSYGLAADNIIDAHLVNVHGK | |
| | VLDRKSMGEDLFWALRGGGAESFGIIVAWKIRLVAVPKSTIFSVKKIM | |
| | EIHELVKLVNKWQNIAYKYDKDLLLMTHFITRNITDNQGKNKTAIHTY | |
| | FSSVFLGGVDSLVDLMNKSFPELGIKKTDCRQLSWIDTIIFYSGVVNYD | |
| | TDNFNKEILLDRSAGQNGAFKIKLDYVKKPIPESVFVQILEKLYEEDIGA | |
| | GMYALYPYGGIMDEISESAIPFPHRAGILYELWYICSWEKQEDNEKHL | |
| | NWIRNIYNFMTPYVSQNPRLAYLNYRDLDIGINDPKNPNNYTQARIWG | |
| | EKYFGKNFDRLVKVKTLVDPNNFFRNEQSIPPLPRHRH | |
| PIR3_ | NIQTSIANPRENFLKCFSQYIPNNATNLKLVYTQNDPLYMSVLNSTIHN | 259 |
| CBDAS_ | LRFSSDTTPKPLVIVTPSHVSHIQATILCSKKVGLQIRTRSGGHDSEGMS | |
| G307A_ | YISQVPFVIVDLRNMRSIKIDVHSQTAWVEAGATLGEVYYWVNEKNES | |
| N269D | LSLAAGYCPTVCAGGHFGGGGYGPLMRSYGLAADNIIDAHLVNVHGK | |
| | VLDRKSMGEDLFWALRGGGAESFGIIVAWKIRLVAVPKSTMFSVKKI | |
| | MEIHELVKLVNKWQNIAYKYDKDLLLMTHFITRNITDNQGKNKTAIHT | |
| | YFSSVFLGGVDSLVDLMNKSFPELGIKKTDCRQLSWIDTIIFYSGVVNY | |
| | DTDNFNKEILLDRSAGQNGAFKIKLDYVKKPIPESVFVQILEKLYEEDIG | |
| | AGMYALYPYGGIMDEISESAIPFPHRAGILYELWYICSWEKQEDNEKH | |
| | LNWIRNIYNFMTPYVSQNPRLAYLNYRDLDIGINDPKNPNNYTQARIW | |
| | GEKYFGKNFDRLVKVKTLVDPNNFFRNEQSIPPLPRHRH | |
| PIR3_ | NIQTSIANPRENFLKCFSQYIPNNATNLKLVYTQNNPLYMSVLNSTIHN | 260 |
| CBDAS_ | LRFSSDTTPKPLVIVTPSHVSHIQATILCSKKVGLQIRTRSGGHDSEGMS | |
| G307A_P464PS | YISQVPFVIVDLRNMRSIKIDVHSQTAWVEAGATLGEVYYWVNEKNES | |
| | LSLAAGYCPTVCAGGHFGGGGYGPLMRSYGLAADNIIDAHLVNVHGK | |
| | VLDRKSMGEDLFWALRGGGAESFGIIVAWKIRLVAVPSKSTMFSVKKI | |
| | MEIHELVKLVNKWQNIAYKYDKDLLLMTHFITRNITDNQGKNKTAIHT | |
| | YFSSVFLGGVDSLVDLMNKSFPELGIKKTDCRQLSWIDTIIFYSGVVNY | |
| | DTDNFNKEILLDRSAGQNGAFKIKLDYVKKPIPESVFVQILEKLYEEDIG | |
| | AGMYALYPYGGIMDEISESAIPFPHRAGILYELWYICSWEKQEDNEKH | |
| | LNWIRNIYNFMTPYVSQNPRLAYLNYRDLDIGINDPKNPNNYTQARIW | |
| | GEKYFGKNFDRLVKVKTLVDPNNFFRNEQSIPPLPRHRH | |
| PIR3_ | NIQTSIANPQENFLKCFSQYIPNNATNLKLVYTQNNPLYMSVLNSTIHN | 261 |
| CBDAS_ | LRFSSDTTPKPLVIVTPSHVSHIQATILCSKKVGLQIRTRSGGHDSEGMS | |
| G307A_R243Q | YISQVPFVIVDLRNMRSIKIDVHSQTAWVEAGATLGEVYYWVNEKNES | |
| | LSLAAGYCPTVCAGGHFGGGGYGPLMRSYGLAADNIIDAHLVNVHGK | |
| | VLDRKSMGEDLFWALRGGGAESFGIIVAWKIRLVAVPKSTMFSVKKI | |
| | MEIHELVKLVNKWQNIAYKYDKDLLLMTHFITRNITDNQGKNKTAIHT | |
| | YFSSVFLGGVDSLVDLMNKSFPELGIKKTDCRQLSWIDTIIFYSGVVNY | |
| | DTDNFNKEILLDRSAGQNGAFKIKLDYVKKPIPESVFVQILEKLYEEDIG | |
| | AGMYALYPYGGIMDEISESAIPFPHRAGILYELWYICSWEKQEDNEKH | |
| | LNWIRNIYNFMTPYVSQNPRLAYLNYRDLDIGINDPKNPNNYTQARIW | |
| | GEKYFGKNFDRLVKVKTLVDPNNFFRNEQSIPPLPRHRH | |
| PIR3_ | NIQTSIANPRENFLKCFSQYIPNNATNLKLVYTQNNPLYMSVLNSTIHN | 262 |
| CBDAS_ | LRFSSDTTPKPLVIVTPSHVSHIQATILCSKKVGLQIRTRSGGHDAEGMS | |
| G307A_S328A | YISQVPFVIVDLRNMRSIKIDVHSQTAWVEAGATLGEVYYWVNEKNES | |
| | LSLAAGYCPTVCAGGHFGGGGYGPLMRSYGLAADNIIDAHLVNVHGK | |
| | VLDRKSMGEDLFWALRGGGAESFGIIVAWKIRLVAVPKSTMFSVKKI | |
| | MEIHELVKLVNKWQNIAYKYDKDLLLMTHFITRNITDNQGKNKTAIHT | |
| | YFSSVFLGGVDSLVDLMNKSFPELGIKKTDCRQLSWIDTIIFYSGVVNY | |
| | DTDNFNKEILLDRSAGQNGAFKIKLDYVKKPIPESVFVQILEKLYEEDIG | |
| | AGMYALYPYGGIMDEISESAIPFPHRAGILYELWYICSWEKQEDNEKH | |
| | LNWIRNIYNFMTPYVSQNPRLAYLNYRDLDIGINDPKNPNNYTQARIW | |
| | GEKYFGKNFDRLVKVKTLVDPNNFFRNEQSIPPLPRHRH | |
| PIR3_ | NIQTSIANPRENFLKCFSQYIPNNATNLKLVYTQNNPLYMSVLNSTIHN | 263 |
| CBDAS_ | LRFSSDTTPKPLVIVTPSHVSHIQATILCSKKVGLQIRTRSGGHDSEGMS | |
| G307A_S449N | YISQVPFVIVDLRNMRSIKIDVHSQTAWVEAGATLGEVYYWVNEKNES | |
| | LSLAAGYCPTVCAGGHFGGGGYGPLMRSYGLAADNIIDAHLVNVHGK | |
| | VLDRKSMGEDLFWALRGGGAENFGIIVAWKIRLVAVPKSTMFSVKKI | |
| | MEIHELVKLVNKWQNIAYKYDKDLLLMTHFITRNITDNQGKNKTAIHT | |
| | YFSSVFLGGVDSLVDLMNKSFPELGIKKTDCRQLSWIDTIIFYSGVVNY | |
| | DTDNFNKEILLDRSAGQNGAFKIKLDYVKKPIPESVFVQILEKLYEEDIG | |
| | AGMYALYPYGGIMDEISESAIPFPHRAGILYELWYICSWEKQEDNEKH | |
| | LNWIRNIYNFMTPYVSQNPRLAYLNYRDLDIGINDPKNPNNYTQARIW | |
| | GEKYFGKNFDRLVKVKTLVDPNNFIRNEQSIPPLPRHRH | |
| PIR3_ | NIQTSIANPRENFLKCFSQYIPNNATNLKLVYTQNNPLYMSVLNSTIHN | 264 |
| CBDAS_ | LRFSSDTTPKPLVIVTPSHVSHIQATILCSKKVGLQIRTRSGGHDSEGMS | |
| G307A_V454A | YISQVPFVIVDLRNMRSIKIDVHSQTAWVEAGATLGEVYYWVNEKNES | |
| | LSLAAGYCPTVCAGGHFGGGGYGPLMRSYGLAADNIIDAHLVNVHGK | |
| | VLDRKSMGEDLFWALRGGGAESFGIIAAWKIRLVAVPKSTMFSVKKI | |
| | MEIHELVKLVNKWQNIAYKYDKDLLLMTHFITRNITDNQGKNKTAIHT | |
| | YFSSVFLGGVDSLVDLMNKSFPELGIKKTDCRQLSWIDTIIFYSGVVNY | |
| | DTDNFNKEILLDRSAGQNGAFKIKLDYVKKPIPESVFVQILEKLYEEDIG | |
| | AGMYALYPYGGIMDEISESAIPFPHRAGILYELWYICSWEKQEDNEKH | |
| | LNWIRNIYNFMTPYVSQNPRLAYLNYRDLDIGINDPKNPNNYTQARIW | |
| | GEKYFGKNFDRLVKVKTLVDPNNFFRNEQSIPPLPRHRH | |
| PIR3_ | NIQTSIANPRENFLKCFSQYIPNNATNLKLVYTQNNPLYMSVLNSTIHN | 265 |
| CBDAS_ | LRFSSDTTPKPLVIVTPSHVSHIQATILCSKKVGLQIRTRSGGHDSEGMS | |
| G307A_Y571F | YISQVPFVIVDLRNMRSIKIDVHSQTAWVEAGATLGEVYYWVNEKNES | |
| | LSLAAGYCPTVCAGGHFGGGGYGPLMRSYGLAADNIIDAHLVNVHGK | |
| | VLDRKSMGEDLFWALRGGGAESFGIIVAWKIRLVAVPKSTMFSVKKI | |
| | MEIHELVKLVNKWQNIAYKYDKDLLLMTHFITRNITDNQGKNKTAIHT | |
| | YFSSVFLGGVDSLVDLMNKSFPELGIKKTDCRQLSWIDTIIFYSGVVNF | |
| | DTDNFNKEILLDRSAGQNGAFKIKLDYVKKPIPESVFVQILEKLYEEDIG | |
| | AGMYALYPYGGIMDEISESAIPFPHRAGILYELWYICSWEKQEDNEKH | |
| | LNWIRNIYNFMTPYVSQNPRLAYLNYRDLDIGINDPKNPNNYTQARIW | |
| | GEKYFGKNFDRLVKVKTLVDPNNFFRNEQSIPPLPRHRH | |
| PIR3_ | NIQTSIANPRENFLKCFSQYIPNNATNLKLVYTQNNPLYMSVLNSTIHN | 266 |
| CBDAS_ | LRFSSDTTPKPLVIVTPSHVSHIQGTILCSKKVGLQIRTRSGGHDSEGMS | |
| H425D_M468I | YISQVPFVIVDLRNMRSIKIDVHSQTAWVEAGATLGEVYYWVNEKNES | |
| | LSLAAGYCPTVCAGGHFGGGGYGPLMRSYGLAADNIIDAHLVNVDGK | |
| | VLDRKSMGEDLFWALRGGGAESFGIIVAWKIRLVAVPKSTIFSVKKIM | |
| | EIHELVKLVNKWQNIAYKYDKDLLLMTHFITRNITDNQGKNKTAIHTY | |
| | FSSVFLGGVDSLVDLMNKSFPELGIKKTDCRQLSWIDTIIFYSGVVNYD | |
| | TDNFNKEILLDRSAGQNGAFKIKLDYVKKPIPESVFVQILEKLYEEDIGA | |
| | GMYALYPYGGIMDEISESAIPFPHRAGILYELWYICSWEKQEDNEKHL | |
| | NWIRNIYNFMTPYVSQNPRLAYLNYRDLDIGINDPKNPNNYTQARIWG | |
| | EKYFGKNFDRLVKVKTLVDPNNFFRNEQSIPPLPRHRH | |
| PIR3_ | NIQTSIANPRENFLKCFSQYIPNNATNLKLVYTQNDPLYMSVLNSTIHN | 267 |
| CBDAS_ | LRFSSDTTPKPLVIVTPSHVSHIQGTILCSKKVGLQIRTRSGGHDSEGMS | |
| H425D_N269D | YISQVPFVIVDLRNMRSIKIDVHSQTAWVEAGATLGEVYYWVNEKNES | |
| | LSLAAGYCPTVCAGGHFGGGGYGPLMRSYGLAADNIIDAHLVNVDGK | |
| | VLDRKSMGEDLFWALRGGGAESFGIIVAWKIRLVAVPKSTMFSVKKI | |
| | MEIHELVKLVNKWQNIAYKYDKDLLLMTHFITRNITDNQGKNKTAIHT | |
| | YFSSVFLGGVDSLVDLMNKSFPELGIKKTDCRQLSWIDTIIFYSGVVNY | |
| | DTDNFNKEILLDRSAGQNGAFKIKLDYVKKPIPESVFVQILEKLYEEDIG | |
| | AGMYALYPYGGIMDEISESAIPFPHRAGILYELWYICSWEKQEDNEKH | |
| | LNWIRNIYNFMTPYVSQNPRLAYLNYRDLDIGINDPKNPNNYTQARIW | |
| | GEKYFGKNFDRLVKVKTLVDPNNFFRNEQSIPPLPRHRH | |
| PIR3_ | NIQTSIANPRENFLKCFSQYIPNNATNLKLVYTQNNPLYMSVLNSTIHN | 268 |
| CBDAS_ | LRFSSDTTPKPLVIVTPSHVSHIQGTILCSKKVGLQIRTRSGGHDSEGMS | |
| H425D_V454A | YISQVPFVIVDLRNMRSIKIDVHSQTAWVEAGATLGEVYYWVNEKNES | |
| | LSLAAGYCPTVCAGGHFGGGGYGPLMRSYGLAADNIIDAHLVNVDGK | |
| | VLDRKSMGEDLFWALRGGGAESFGIIAAWKIRLVAVPKSTMFSVKKI | |
| | MEIHELVKLVNKWQNIAYKYDKDLLLMTHFITRNITDNQGKNKTAIHT | |
| | YFSSVFLGGVDSLVDLMNKSFPELGIKKTDCRQLSWIDTIIFYSGVVNY | |
| | DTDNFNKEILLDRSAGQNGAFKIKLDYVKKPIPESVFVQILEKLYEEDIG | |
| | AGMYALYPYGGIMDEISESAIPFPHRAGILYELWYICSWEKQEDNEKH | |
| | LNWIRNIYNFMTPYVSQNPRLAYLNYRDLDIGINDPKNPNNYTQARIW | |
| | GEKYFGKNFDRLVKVKTLVDPNNFFRNEQSIPPLPRHRH | |
| PIR3_ | NIQTSIANPRENFLKCFSQYIPNNATNLKLVYTQNDPLYMSVLNSTIHN | 269 |
| CBDAS_ | LRFSSDTTPKPLVIVTPSHVSHIQGTILCSKKVGLQIRTRSGGHDSEGMS | |
| N269D_M468I | YISQVPFVIVDLRNMRSIKIDVHSQTAWVEAGATLGEVYYWVNEKNES | |
| | LSLAAGYCPTVCAGGHFGGGGYGPLMRSYGLAADNIIDAHLVNVHGK | |
| | VLDRKSMGEDLFWALRGGGAESFGIIVAWKIRLVAVPKSTIFSVKKIM | |
| | EIHELVKLVNKWQNIAYKYDKDLLLMTHFITRNITDNQGKNKTAIHTY | |
| | FSSVFLGGVDSLVDLMNKSFPELGIKKTDCRQLSWIDTIIFYSGVVNYD | |
| | TDNFNKEILLDRSAGQNGAFKIKLDYVKKPIPESVFVQILEKLYEEDIGA | |
| | GMYALYPYGGIMDEISESAIPFPHRAGILYELWYICSWEKQEDNEKHL | |
| | NWIRNIYNFMTPYVSQNPRLAYLNYRDLDIGINDPKNPNNYTQARIWG | |
| | EKYFGKNFDRLVKVKTLVDPNNFFRNEQSIPPLPRHRH | |
| PIR3_ | NIQTSIANPRENFLKCFSQYIPNNATNLKLVYTQNNPLYMSVLNSTIHN | 270 |
| CBDAS_ | LRFSSDTTPKPLVIVTPSHVSHIQGTILCSKKVGLQIRTRSGGHDSEGMS | |
| P464PS_H425D | YISQVPFVIVDLRNMRSIKIDVHSQTAWVEAGATLGEVYYWVNEKNES | |
| | LSLAAGYCPTVCAGGHFGGGGYGPLMRSYGLAADNIIDAHLVNVDGK | |
| | VLDRKSMGEDLFWALRGGGAESFGIIVAWKIRLVAVPSKSTMFSVKKI | |
| | MEIHELVKLVNKWQNIAYKYDKDLLLMTHFITRNITDNQGKNKTAIHT | |
| | YFSSVFLGGVDSLVDLMNKSFPELGIKKTDCRQLSWIDTIIFYSGVVNY | |
| | DTDNFNKEILLDRSAGQNGAFKIKLDYVKKPIPESVFVQILEKLYEEDIG | |
| | AGMYALYPYGGIMDEISESAIPFPHRAGILYELWYICSWEKQEDNEKH | |
| | LNWIRNIYNFMTPYVSQNPRLAYLNYRDLDIGINDPKNPNNYTQARIW | |
| | GEKYFGKNFDRLVKVKTLVDPNNFFRNEQSIPPLPRHRH | |
| PIR3_ | NIQTSIANPRENFLKCFSQYIPNNATNLKLVYTQNDPLYMSVLNSTIHN | 271 |
| CBDAS_ | LRFSSDTTPKPLVIVTPSHVSHIQGTILCSKKVGLQIRTRSGGHDSEGMS | |
| P464PS_N269D | YISQVPFVIVDLRNMRSIKIDVHSQTAWVEAGATLGEVYYWVNEKNES | |
| | LSLAAGYCPTVCAGGHFGGGGYGPLMRSYGLAADNIIDAHLVNVHGK | |
| | VLDRKSMGEDLFWALRGGGAESFGIIVAWKIRLVAVPSKSTMFSVKKI | |
| | MEIHELVKLVNKWQNIAYKYDKDLLLMTHFITRNITDNQGKNKTAIHT | |
| | YFSSVFLGGVDSLVDLMNKSFPELGIKKTDCRQLSWIDTIIFYSGVVNY | |
| | DTDNFNKEILLDRSAGQNGAFKIKLDYVKKPIPESVFVQILEKLYEEDIG | |
| | AGMYALYPYGGIMDEISESAIPFPHRAGILYELWYICSWEKQEDNEKH | |
| | LNWIRNIYNFMTPYVSQNPRLAYLNYRDLDIGINDPKNPNNYTQARIW | |
| | GEKYFGKNFDRLVKVKTLVDPNNFFRNEQSIPPLPRHRH | |
| PIR3_ | NIQTSIANPRENFLKCFSQYIPNNATNLKLVYTQNNPLYMSVLNSTIHN | 272 |
| CBDAS_ | LRFSSDTTPKPLVIVTPSHVSHIQGTILCSKKVGLQIRTRSGGHDSEGMS | |
| P464PS_T468 | YISQVPFVIVDLRNMRSIKIDVHSQTAWVEAGATLGEVYYWVNEKNES | |
| I | LSLAAGYCPTVCAGGHFGGGGYGPLMRSYGLAADNIIDAHLVNVHGK | |
| | VLDRKSMGEDLFWALRGGGAESFGIIVAWKIRLVAVPSKSIMFSVKKI | |
| | MEIHELVKLVNKWQNIAYKYDKDLLLMTHFITRNITDNQGKNKTAIHT | |
| | YFSSVFLGGVDSLVDLMNKSFPELGIKKTDCRQLSWIDTIIFYSGVVNY | |
| | DTDNFNKEILLDRSAGQNGAFKIKLDYVKKPIPESVFVQILEKLYEEDIG | |
| | AGMYALYPYGGIMDEISESAIPFPHRAGILYELWYICSWEKQEDNEKH | |
| | LNWIRNIYNFMTPYVSQNPRLAYLNYRDLDIGINDPKNPNNYTQARIW | |
| | GEKYFGKNFDRLVKVKTLVDPNNFFRNEQSIPPLPRHRH | |
| PIR3_ | NIQTSIANPRENFLKCFSQYIPNNATNLKLVYTQNNPLYMSVLNSTIHN | 273 |
| CBDAS_ | LRFSSDTTPKPLVIVTPSHVSHIQGTILCSKKVGLQIRTRSGGHDSEGMS | |
| P464PS_V454A | YISQVPFVIVDLRNMRSIKIDVHSQTAWVEAGATLGEVYYWVNEKNES | |
| | LSLAAGYCPTVCAGGHFGGGGYGPLMRSYGLAADNIIDAHLVNVHGK | |
| | VLDRKSMGEDLFWALRGGGAESFGIIAAWKIRLVAVPSKSTMFSVKKI | |
| | MEIHELVKLVNKWQNIAYKYDKDLLLMTHFITRNITDNQGKNKTAIHT | |
| | YFSSVFLGGVDSLVDLMNKSFPELGIKKTDCRQLSWIDTIIFYSGVVNY | |
| | DTDNFNKEILLDRSAGQNGAFKIKLDYVKKPIPESVFVQILEKLYEEDIG | |
| | AGMYALYPYGGIMDEISESAIPFPHRAGILYELWYICSWEKQEDNEKH | |
| | LNWIRNIYNFMTPYVSQNPRLAYLNYRDLDIGINDPKNPNNYTQARIW | |
| | GEKYFGKNFDRLVKVKTLVDPNNFFRNEQSIPPLPRHRH | |
| PIR3_ | NIQTSIANPRENFLKCFSQYIPNNATNLKLVYTQNNPLYMSVLNSTIHN | 274 |
| CBDAS_ | LRFSSDTTPKPLVIVTPSHVSHIQGTILCSKKVGLQIRTRSGGHDSEGMS | |
| S449N_H425D | YISQVPFVIVDLRNMRSIKIDVHSQTAWVEAGATLGEVYYWVNEKNES | |
| | LSLAAGYCPTVCAGGHFGGGGYGPLMRSYGLAADNIIDAHLVNVDGK | |
| | VLDRKSMGEDLFWALRGGGAENFGIIVAWKIRLVAVPKSTMFSVKKI | |
| | MEIHELVKLVNKWQNIAYKYDKDLLLMTHFITRNITDNQGKNKTAIHT | |
| | YFSSVFLGGVDSLVDLMNKSFPELGIKKTDCRQLSWIDTIIFYSGVVNY | |
| | DTDNFNKEILLDRSAGQNGAFKIKLDYVKKPIPESVFVQILEKLYEEDIG | |
| | AGMYALYPYGGIMDEISESAIPFPHRAGILYELWYICSWEKQEDNEKH | |
| | LNWIRNIYNFMTPYVSQNPRLAYLNYRDLDIGINDPKNPNNYTQARIW | |
| | GEKYFGKNFDRLVKVKTLVDPNNFFRNEQSIPPLPRHRH | |
| PIR3_ | NIQTSIANPRENFLKCFSQYIPNNATNLKLVYTQNNPLYMSVLNSTIHN | 275 |
| CBDAS_ | LRFSSDTTPKPLVIVTPSHVSHIQGTILCSKKVGLQIRTRSGGHDSEGMS | |
| S449N_I620V | YISQVPFVIVDLRNMRSIKIDVHSQTAWVEAGATLGEVYYWVNEKNES | |
| | LSLAAGYCPTVCAGGHFGGGGYGPLMRSYGLAADNIIDAHLVNVHGK | |
| | VLDRKSMGEDLFWALRGGGAENFGIIVAWKIRLVAVPKSTMFSVKKI | |
| | MEIHELVKLVNKWQNIAYKYDKDLLLMTHFITRNITDNQGKNKTAIHT | |
| | YFSSVFLGGVDSLVDLMNKSFPELGIKKTDCRQLSWIDTIIFYSGVVNY | |
| | DTDNFNKEILLDRSAGQNGAFKIKLDYVKKPIPESVFVQILEKLYEEDV | |
| | GAGMYALYPYGGIMDEISESAIPFPHRAGILYELWYICSWEKQEDNEK | |
| | HLNWIRNIYNFMTPYVSQNPRLAYLNYRDLDIGINDPKNPNNYTQARI | |
| | WGEKYFGKNFDRLVKVKTLVDPNNFFRNEQSIPPLPRHRH | |
| PIR3_ | NIQTSIANPRENFLKCFSQYIPNNATNLKLVYTQNNPLYMSVLNSTIHN | 276 |
| CBDAS_ | LRFSSDTTPKPLVIVTPSHVSHIQGTILCSKKVGLQIRTRSGGHDSEGMS | |
| S449N_I676V | YISQVPFVIVDLRNMRSIKIDVHSQTAWVEAGATLGEVYYWVNEKNES | |
| | LSLAAGYCPTVCAGGHFGGGGYGPLMRSYGLAADNIIDAHLVNVHGK | |
| | VLDRKSMGEDLFWALRGGGAENFGIIVAWKIRLVAVPKSTMFSVKKI | |
| | MEIHELVKLVNKWQNIAYKYDKDLLLMTHFITRNITDNQGKNKTAIHT | |
| | YFSSVFLGGVDSLVDLMNKSFPELGIKKTDCRQLSWIDTIIFYSGVVNY | |
| | DTDNFNKEILLDRSAGQNGAFKIKLDYVKKPIPESVFVQILEKLYEEDIG | |
| | AGMYALYPYGGIMDEISESAIPFPHRAGILYELWYICSWEKQEDNEKH | |
| | LNWIRNVYNFMTPYVSQNPRLAYLNYRDLDIGINDPKNPNNYTQARI | |
| | WGEKYFGKNFDRLVKVKTLVDPNNFFRNEQSIPPLPRHRH | |
| PIR3_ | NIQTSIANPRENFLKCFSQYIPNNATNLKLVYTQNNPLYMSVLNSTIHN | 277 |
| CBDAS_ | LRFSSDTTPKPLVIVTPSHVSHIQGTILCSKKVGLQIRTRSGGHDSEGMS | |
| S449N_I700L | YISQVPFVIVDLRNMRSIKIDVHSQTAWVEAGATLGEVYYWVNEKNES | |
| | LSLAAGYCPTVCAGGHFGGGGYGPLMRSYGLAADNIIDAHLVNVHGK | |
| | VLDRKSMGEDLFWALRGGGAENFGIIVAWKIRLVAVPKSTMFSVKKI | |
| | MEIHELVKLVNKWQNIAYKYDKDLLLMTHFITRNITDNQGKNKTAIHT | |
| | YFSSVFLGGVDSLVDLMNKSFPELGIKKTDCRQLSWIDTIIFYSGVVNY | |
| | DTDNFNKEILLDRSAGQNGAFKIKLDYVKKPIPESVFVQILEKLYEEDIG | |
| | AGMYALYPYGGIMDEISESAIPFPHRAGILYELWYICSWEKQEDNEKH | |
| | LNWIRNIYNFMTPYVSQNPRLAYLNYRDLDLGINDPKNPNNYTQARIW | |
| | GEKYFGKNFDRLVKVKTLVDPNNFFRNEQSIPPLPRHRH | |
| PIR3_ | NIQTSIANPRENFLKCFSQYIPNNATNLKLVYTQNNPLYMSVLNSTIHN | 278 |
| CBDAS_ | LRFSSDTTPKPLVIVTPSHVSHIQGTILCSKKVGLQIRTRSGGHDSEGMS | |
| S449N_L442I | YISQVPFVIVDLRNMRSIKIDVHSQTAWVEAGATLGEVYYWVNEKNES | |
| | LSLAAGYCPTVCAGGHFGGGGYGPLMRSYGLAADNIIDAHLVNVHGK | |
| | VLDRKSMGEDLFWAIRGGGAENFGIIVAWKIRLVAVPKSTMFSVKKIM | |
| | EIHELVKLVNKWQNIAYKYDKDLLLMTHFITRNITDNQGKNKTAIHTY | |
| | FSSVFLGGVDSLVDLMNKSFPELGIKKTDCRQLSWIDTIIFYSGVVNYD | |
| | TDNFNKEILLDRSAGQNGAFKIKLDYVKKPIPESVFVQILEKLYEEDIGA | |
| | GMYALYPYGGIMDEISESAIPFPHRAGILYELWYICSWEKQEDNEKHL | |
| | NWIRNIYNFMTPYVSQNPRLAYLNYRDLDIGINDPKNPNNYTQARIWG | |
| | EKYFGKNFDRLVKVKTLVDPNNFFRNEQSIPPLPRHRH | |
| PIR3_ | NIQTSIANPRENFLKCFSQYIPNNATNLKLVYTQNNPLYMSVLNSTIHN | 279 |
| CBDAS_ | LRFSSDTTPKPLVIVTPSHVSHIQGTILCSKKVGLQIRTRSGGHDSEGMS | |
| S449N_M468I | YISQVPFVIVDLRNMRSIKIDVHSQTAWVEAGATLGEVYYWVNEKNES | |
| | LSLAAGYCPTVCAGGHFGGGGYGPLMRSYGLAADNIIDAHLVNVHGK | |
| | VLDRKSMGEDLFWALRGGGAENFGIIVAWKIRLVAVPKSTIFSVKKIM | |
| | EIHELVKLVNKWQNIAYKYDKDLLLMTHFITRNITDNQGKNKTAIHTY | |
| | FSSVFLGGVDSLVDLMNKSFPELGIKKTDCRQLSWIDTIIFYSGVVNYD | |
| | TDNFNKEILLDRSAGQNGAFKIKLDYVKKPIPESVFVQILEKLYEEDIGA | |
| | GMYALYPYGGIMDEISESAIPFPHRAGILYELWYICSWEKQEDNEKHL | |
| | NWIRNIYNFMTPYVSQNPRLAYLNYRDLDIGINDPKNPNNYTQARIWG | |
| | EKYFGKNFDRLVKVKTLVDPNNFFRNEQSIPPLPRHRH | |
| PIR3_ | NIQTSIANPRENFLKCFSQYIPNNATNLKLVYTQNDPLYMSVLNSTIHN | 280 |
| CBDAS_ | LRFSSDTTPKPLVIVTPSHVSHIQGTILCSKKVGLQIRTRSGGHDSEGMS | |
| S449N_N269D | YISQVPFVIVDLRNMRSIKIDVHSQTAWVEAGATLGEVYYWVNEKNES | |
| | LSLAAGYCPTVCAGGHFGGGGYGPLMRSYGLAADNIIDAHLVNVHGK | |
| | VLDRKSMGEDLFWALRGGGAENFGIIVAWKIRLVAVPKSTMFSVKKI | |
| | MEIHELVKLVNKWQNIAYKYDKDLLLMTHFITRNITDNQGKNKTAIHT | |
| | YFSSVFLGGVDSLVDLMNKSFPELGIKKTDCRQLSWIDTIIFYSGVVNY | |
| | DTDNFNKEILLDRSAGQNGAFKIKLDYVKKPIPESVFVQILEKLYEEDIG | |
| | AGMYALYPYGGIMDEISESAIPFPHRAGILYELWYICSWEKQEDNEKH | |
| | LNWIRNIYNFMTPYVSQNPRLAYLNYRDLDIGINDPKNPNNYTQARIW | |
| | GEKYFGKNFDRLVKVKTLVDPNNFFRNEQSIPPLPRHRH | |
| PIR3_ | NIQTSIANPRENFLKCFSQYIPNNATNLKLVYTQNNPLYMSVLNSTIHN | 281 |
| CBDAS_ | LRFSSDTTPKPLVIVTPSHVSHIQGTILCSKKVGLQIRTRSGGHDSEGMS | |
| S449N_ | YISQVPFVIVDLRNMRSIKIDVHSQTAWVEAGATLGEVYYWVNEKNES | |
| P464PS | LSLAAGYCPTVCAGGHFGGGGYGPLMRSYGLAADNIIDAHLVNVHGK | |
| | VLDRKSMGEDLFWALRGGGAENFGIIVAWKIRLVAVPSKSTMFSVKKI | |
| | MEIHELVKLVNKWQNIAYKYDKDLLLMTHFITRNITDNQGKNKTAIHT | |
| | YFSSVFLGGVDSLVDLMNKSFPELGIKKTDCRQLSWIDTIIFYSGVVNY | |
| | DTDNFNKEILLDRSAGQNGAFKIKLDYVKKPIPESVFVQILEKLYEEDIG | |
| | AGMYALYPYGGIMDEISESAIPFPHRAGILYELWYICSWEKQEDNEKH | |
| | LNWIRNIYNFMTPYVSQNPRLAYLNYRDLDIGINDPKNPNNYTQARIW | |
| | GEKYFGKNFDRLVKVKTLVDPNNFFRNEQSIPPLPRHRH | |
| PIR3_ | NIQTSIANPQENFLKCFSQYIPNNATNLKLVYTQNNPLYMSVLNSTIHN | 282 |
| CBDAS_ | LRFSSDTTPKPLVIVTPSHVSHIQGTILCSKKVGLQIRTRSGGHDSEGMS | |
| S449N_R243Q | YISQVPFVIVDLRNMRSIKIDVHSQTAWVEAGATLGEVYYWVNEKNES | |
| | LSLAAGYCPTVCAGGHFGGGGYGPLMRSYGLAADNIIDAHLVNVHGK | |
| | VLDRKSMGEDLFWALRGGGAENFGIIVAWKIRLVAVPKSTMFSVKKI | |
| | MEIHELVKLVNKWQNIAYKYDKDLLLMTHFITRNITDNQGKNKTAIHT | |
| | YFSSVFLGGVDSLVDLMNKSFPELGIKKTDCRQLSWIDTIIFYSGVVNY | |
| | DTDNFNKEILLDRSAGQNGAFKIKLDYVKKPIPESVFVQILEKLYEEDIG | |
| | AGMYALYPYGGIMDEISESAIPFPHRAGILYELWYICSWEKQEDNEKH | |
| | LNWIRNIYNFMTPYVSQNPRLAYLNYRDLDIGINDPKNPNNYTQARIW | |
| | GEKYFGKNFDRLVKVKTLVDPNNFFRNEQSIPPLPRHRH | |
| PIR3_ | NIQTSIANPRENFLKCFSQYIPNNATNLKLVYTQNNPLYMSVLNSTIHN | 283 |
| CBDAS_ | LRFSSDTTPKPLVIVTPSHVSHIQGTILCSKKVGLQIRTRSGGHDAEGMS | |
| S449N_S328A | YISQVPFVIVDLRNMRSIKIDVHSQTAWVEAGATLGEVYYWVNEKNES | |
| | LSLAAGYCPTVCAGGHFGGGGYGPLMRSYGLAADNIIDAHLVNVHGK | |
| | VLDRKSMGEDLFWALRGGGAENFGIIVAWKIRLVAVPKSTMFSVKKI | |
| | MEIHELVKLVNKWQNIAYKYDKDLLLMTHFITRNITDNQGKNKTAIHT | |
| | YFSSVFLGGVDSLVDLMNKSFPELGIKKTDCRQLSWIDTIIFYSGVVNY | |
| | DTDNFNKEILLDRSAGQNGAFKIKLDYVKKPIPESVFVQILEKLYEEDIG | |
| | AGMYALYPYGGIMDEISESAIPFPHRAGILYELWYICSWEKQEDNEKH | |
| | LNWIRNIYNFMTPYVSQNPRLAYLNYRDLDIGINDPKNPNNYTQARIW | |
| | GEKYFGKNFDRLVKVKTLVDPNNFFRNEQSIPPLPRHRH | |
| PIR3_ | NIQTSIANPRENFLKCFSQYIPNNATNLKLVYTQNNPLYMSVLNSTIHN | 284 |
| CBDAS_ | LRFSSDTTPKPLVIVTPSHVSHIQGTILCSKKVGLQIRTRSGGHDSEGMS | |
| S449N_V454A | YISQVPFVIVDLRNMRSIKIDVHSQTAWVEAGATLGEVYYWVNEKNES | |
| | LSLAAGYCPTVCAGGHFGGGGYGPLMRSYGLAADNIIDAHLVNVHGK | |
| | VLDRKSMGEDLFWALRGGGAENFGIIAAWKIRLVAVPKSTMFSVKKI | |
| | MEIHELVKLVNKWQNIAYKYDKDLLLMTHFITRNITDNQGKNKTAIHT | |
| | YFSSVFLGGVDSLVDLMNKSFPELGIKKTDCRQLSWIDTIIFYSGVVNY | |
| | DTDNFNKEILLDRSAGQNGAFKIKLDYVKKPIPESVFVQILEKLYEEDIG | |
| | AGMYALYPYGGIMDEISESAIPFPHRAGILYELWYICSWEKQEDNEKH | |
| | LNWIRNIYNFMTPYVSQNPRLAYLNYRDLDIGINDPKNPNNYTQARIW | |
| | GEKYFGKNFDRLVKVKTLVDPNNFFRNEQSIPPLPRHRH | |
| PIR3_ | NIQTSIANPRENFLKCFSQYIPNNATNLKLVYTQNNPLYMSVLNSTIHN | 285 |
| CBDAS_ | LRFSSDTTPKPLVIVTPSHVSHIQGTILCSKKVGLQIRTRSGGHDSEGMS | |
| S449N_Y571F | YISQVPFVIVDLRNMRSIKIDVHSQTAWVEAGATLGEVYYWVNEKNES | |
| | LSLAAGYCPTVCAGGHFGGGGYGPLMRSYGLAADNIIDAHLVNVHGK | |
| | VLDRKSMGEDLFWALRGGGAENFGIIVAWKIRLVAVPKSTMFSVKKI | |
| | MEIHELVKLVNKWQNIAYKYDKDLLLMTHFITRNITDNQGKNKTAIHT | |
| | YFSSVFLGGVDSLVDLMNKSFPELGIKKTDCRQLSWIDTIIFYSGVVNF | |
| | DTDNFNKEILLDRSAGQNGAFKIKLDYVKKPIPESVFVQILEKLYEEDIG | |
| | AGMYALYPYGGIMDEISESAIPFPHRAGILYELWYICSWEKQEDNEKH | |
| | LNWIRNIYNFMTPYVSQNPRLAYLNYRDLDIGINDPKNPNNYTQARIW | |
| | GEKYFGKNFDRLVKVKTLVDPNNFFRNEQSIPPLPRHRH | |
| PIR3_ | NIQTSIANPRENFLKCFSQYIPNNATNLKLVYTQNNPLYMSVLNSTIHN | 286 |
| CBDAS_ | LRFSSDTTPKPLVIVTPSHVSHIQGTILCSKKVGLQIRTRSGGHDSEGMS | |
| V454A_M468I | YISQVPFVIVDLRNMRSIKIDVHSQTAWVEAGATLGEVYYWVNEKNES | |
| | LSLAAGYCPTVCAGGHFGGGGYGPLMRSYGLAADNIIDAHLVNVHGK | |
| | VLDRKSMGEDLFWALRGGGAESFGIIAAWKIRLVAVPKSTIFSVKKIM | |
| | EIHELVKLVNKWQNIAYKYDKDLLLMTHFITRNITDNQGKNKTAIHTY | |
| | FSSVFLGGVDSLVDLMNKSFPELGIKKTDCRQLSWIDTIIFYSGVVNYD | |
| | TDNFNKEILLDRSAGQNGAFKIKLDYVKKPIPESVFVQILEKLYEEDIGA | |
| | GMYALYPYGGIMDEISESAIPFPHRAGILYELWYICSWEKQEDNEKHL | |
| | NWIRNIYNFMTPYVSQNPRLAYLNYRDLDIGINDPKNPNNYTQARIWG | |
| | EKYFGKNFDRLVKVKTLVDPNNFFRNEQSIPPLPRHRH | |
| PIR3_ | NIQTSIANPRENFLKCFSQYIPNNATNLKLVYTQNDPLYMSVLNSTIHN | 287 |
| CBDAS_ | LRFSSDTTPKPLVIVTPSHVSHIQGTILCSKKVGLQIRTRSGGHDSEGMS | |
| V454A_N269D | YISQVPFVIVDLRNMRSIKIDVHSQTAWVEAGATLGEVYYWVNEKNES | |
| | LSLAAGYCPTVCAGGHFGGGGYGPLMRSYGLAADNIIDAHLVNVHGK | |
| | VLDRKSMGEDLFWALRGGGAESFGIIAAWKIRLVAVPKSTMFSVKKI | |
| | MEIHELVKLVNKWQNIAYKYDKDLLLMTHFITRNITDNQGKNKTAIHT | |
| | YFSSVFLGGVDSLVDLMNKSFPELGIKKTDCRQLSWIDTIIFYSGVVNY | |
| | DTDNFNKEILLDRSAGQNGAFKIKLDYVKKPIPESVFVQILEKLYEEDIG | |
| | AGMYALYPYGGIMDEISESAIPFPHRAGILYELWYICSWEKQEDNEKH | |
| | LNWIRNIYNFMTPYVSQNPRLAYLNYRDLDIGINDPKNPNNYTQARIW | |
| | GEKYFGKNFDRLVKVKTLVDPNNFFRNEQSIPPLPRHRH | |

### Example 25—CBCA Synthase Mutagenesis

[0441] Fifty-three (53) positions around the predicted active site of the Cannabis sativa native CBDA synthase enzyme were mutagenized in a random manner to increase the synthesis of CBCA. The parental plasmid for mutagenesis was the 0285/asn080-2 plasmid. Plasmids carrying mutant CBDA synthase genes were isolated and screened for CBCA synthase activity. The screen identified amino acid positions where substitutions for certain amino acids result in the formation of a highly specific CBCA synthase or CBDA synthase with elevated CBCA synthase activity. The parental plasmid and plasmids with mutant CBDA synthase gene were transformed into the yCBGA0513 strain.

[0442] Mutant CBDA synthases with CBCA activity were screened using the following high throughput screening process: Colonies were inoculated into wells of a 96-well deep well plate. Each well contains 400 μl SC liquid medium (6.7 g/L Yeast Nitrogen Base, 1.6 g/L Amino Acid Drop Out mix without leucine, uracil, tryptophan and histidine, 22 g/L glucose, buffered to pH 6.0, supplemented with leucine, tryptophan, histidine and Hygromycin B). The inoculums were grown for 48 hours at 30° C. and shaken at 300 rpm with 50 mm shaking diameter. After a 48 hour growth period, 40 μl samples of these cultures were inoculated into 360 μl YPD-2400LA (10 g/L yeast extract, 20 g/L peptone, 20 g/L glucose and 240 mg/L olivetolic acid) medium. Then samples were grown for 48 hours at 30° C. and shaken at 300 rpm with 50 mm shaking diameter and 8 μl of 12000 mg/l OLA dissolved in EtOH was added to the samples. Finally, samples were grown for an additional 42 hours and were analyzed for cannabinoids.

[0443] The CBCA titer in the above described screen ranged from 18.0 to 69.6 mg/L. Sample titers for the transformed strains, along with each strain's respective amino acid mutations and amino acid sequences, are included in Tables 27-28 below. (All mutation sites refer to the mutation site on CBDA's coding sequence without the wild-type signal sequence.)

TABLE 27
yCBGA_0513 mutant strains

| | mutation | | | | |
|---|---|---|---|---|---|
| | site on | | | | |
| | CBDAs | | | | |
| | coding | | | | |
| | sequence | | | Average | Average |
| | without the | native | new | titer of | titer of |
| | signal | amino | amino | CBDA | CBCA |
| Constructs | sequence | acid | acid | mg/L | mg/L |
| SP_CBGA1137_10_B10 | 237 | S | Q | 0.0 | 20.9 |
| SP_CBGA1137_03_H01 | 268 | M | T | 0.0 | 60.0 |
| SP_CBGA1137_11_H10 | 292 | S | N | 23.3 | 32.9 |
| SP_CBGA1136_04_F03 | 330 | I | R | 23.2 | 26.8 |
| SP_CBGA1138_12_G06 | 332 | Y | L | 26.8 | 20.9 |
| SP_CBGA1135_11_F02 | 334 | G | Q | 35.9 | 35.9 |
| SP_CBGA1139_01_D07 | 338 | Y | K | 81.9 | 69.6 |
| SP_CBGA1135_10_B02 | 359 | F | H | 26.5 | 21.5 |
| SP_CBGA1136_05_A05 | 361 | I | Y | 0.0 | 22.1 |
| 0285/asn080-2 | wild type | N/A | N/A | 134.0 | 18.0 |
| | control | | | | |
| | construct | | | | |

TABLE 28
yCBGA_0513 mutants

| | | SEQ ID |
|---|---|---|
| Constructs | CBCAs amino acid sequence without the signal sequence | NO: |
| SP_CBGA | NIQTSIANPRENFLKCFSQYIPNNATNLKLVYTQNNPLYMSVLNSTIH | 288 |
| 1137_10_ | NLRFSSDTTPKPLVIVTPSHVSHIQGTILCSKKVGLQIRTRSGGHDSEG | |
| B10 | MSYISQVPFVIVDLRNMRSIKIDVHSQTAWVEAGATLGEVYYWVNE | |
| | KNESLSLAAGYCPTVCAGGHFGGGGYGPLMRSYGLAADNIIDAHLV | |
| | NVHGKVLDRKSMGEDLFWALRGGGAESFGIIVAWKIRLVAVPKSTM | |
| | FQVKKIMEIHELVKLVNKWQNIAYKYDKDLLLMTHFITRNITDNQG | |
| | KNKTAIHTYFSSVFLGGVDSLVDLMNKSFPELGIKKTDCRQLSWIDTI | |
| | IFYSGVVNYDTDNFNKEILLDRSAGQNGAFKIKLDYVKKPIPESVFVQ | |
| | ILEKLYEEDIGAGMYALYPYGGIMDEISESAIPFPHRAGILYELWYICS | |
| | WEKQEDNEKHLNWIRNIYNFMTPYVSQNPRLAYLNYRDLDIGINDP | |
| | KNPNNYTQARIWGEKYFGKNFDRLVKVKTLVDPNNFFRNEQSIPPLP | |
| | RHRH | |
| SP_CBGA | NIQTSIANPRENFLKCFSQYIPNNATNLKLVYTQNNPLYMSVLNSTIH | 289 |
| 1137_03_ | NLRFSSDTTPKPLVIVTPSHVSHIQGTILCSKKVGLQIRTRSGGHDSEG | |
| H01 | MSYISQVPFVIVDLRNMRSIKIDVHSQTAWVEAGATLGEVYYWVNE | |
| | KNESLSLAAGYCPTVCAGGHFGGGGYGPLMRSYGLAADNIIDAHLV | |
| | NVHGKVLDRKSMGEDLFWALRGGGAESFGIIVAWKIRLVAVPKSTM | |
| | FSVKKIMEIHELVKLVNKWQNIAYKYDKDLLLTTHFITRNITDNQGK | |
| | NKTAIHTYFSSVFLGGVDSLVDLMNKSFPELGIKKTDCRQLSWIDTIIF | |
| | YSGVVNYDTDNFNKEILLDRSAGQNGAFKIKLDYVKKPIPESVFVQIL | |
| | EKLYEEDIGAGMYALYPYGGIMDEISESAIPFPHRAGILYELWYICSW | |
| | EKQEDNEKHLNWIRNIYNFMTPYVSQNPRLAYLNYRDLDIGINDPKN | |
| | PNNYTQARIWGEKYFGKNFDRLVKVKTLVDPNNFFRNEQSIPPLPRH | |
| | RH | |
| SP_CBGA | NIQTSIANPRENFLKCFSQYIPNNATNLKLVYTQNNPLYMSVLNSTIH | 290 |
| 1137_11_ | NLRFSSDTTPKPLVIVTPSHVSHIQGTILCSKKVGLQIRTRSGGHDSEG | |
| H10 | MSYISQVPFVIVDLRNMRSIKIDVHSQTAWVEAGATLGEVYYWVNE | |
| | KNESLSLAAGYCPTVCAGGHFGGGGYGPLMRSYGLAADNIIDAHLV | |
| | NVHGKVLDRKSMGEDLFWALRGGGAESFGIIVAWKIRLVAVPKSTM | |
| | FSVKKIMEIHELVKLVNKWQNIAYKYDKDLLLMTHFITRNITDNQGK | |
| | NKTAIHTYFNSVFLGGVDSLVDLMNKSFPELGIKKTDCRQLSWIDTII | |
| | FYSGVVNYDTDNFNKEILLDRSAGQNGAFKIKLDYVKKPIPESVFVQI | |
| | LEKLYEEDIGAGMYALYPYGGIMDEISESAIPFPHRAGILYELWYICS | |
| | WEKQEDNEKHLNWIRNIYNFMTPYVSQNPRLAYLNYRDLDIGINDP | |
| | KNPNNYTQARIWGEKYFGKNFDRLVKVKTLVDPNNFFRNEQSIPPLP | |
| | RHRH | |
| SP_CBGA | NIQTSIANPRENFLKCFSQYIPNNATNLKLVYTQNNPLYMSVLNSTIH | 291 |
| 1136_04_ | NLRFSSDTTPKPLVIVTPSHVSHIQGTILCSKKVGLQIRTRSGGHDSEG | |
| F03 | MSYISQVPFVIVDLRNMRSIKIDVHSQTAWVEAGATLGEVYYWVNE | |
| | KNESLSLAAGYCPTVCAGGHFGGGGYGPLMRSYGLAADNIIDAHLV | |
| | NVHGKVLDRKSMGEDLFWALRGGGAESFGIIVAWKIRLVAVPKSTM | |
| | FSVKKIMEIHELVKLVNKWQNIAYKYDKDLLLMTHFITRNITDNQGK | |
| | NKTAIHTYFSSVFLGGVDSLVDLMNKSFPELGIKKTDCRQLSWIDTIR | |
| | FYSGVVNYDTDNFNKEILLDRSAGQNGAFKIKLDYVKKPIPESVFVQI | |
| | LEKLYEEDIGAGMYALYPYGGIMDEISESAIPFPHRAGILYELWYICS | |
| | WEKQEDNEKHLNWIRNIYNFMTPYVSQNPRLAYLNYRDLDIGINDP | |
| | KNPNNYTQARIWGEKYFGKNFDRLVKVKTLVDPNNFFRNEQSIPPLP | |
| | RHRH | |
| SP_CBGA | NIQTSIANPRENFLKCFSQYIPNNATNLKLVYTQNNPLYMSVLNSTIH | 292 |
| 1138_12_ | NLRFSSDTTPKPLVIVTPSHVSHIQGTILCSKKVGLQIRTRSGGHDSEG | |
| G06 | MSYISQVPFVIVDLRNMRSIKIDVHSQTAWVEAGATLGEVYYWVNE | |
| | KNESLSLAAGYCPTVCAGGHFGGGGYGPLMRSYGLAADNIIDAHLV | |
| | NVHGKVLDRKSMGEDLFWALRGGGAESFGIIVAWKIRLVAVPKSTM | |
| | FSVKKIMEIHELVKLVNKWQNIAYKYDKDLLLMTHFITRNITDNQGK | |
| | NKTAIHTYFSSVFLGGVDSLVDLMNKSFPELGIKKTDCRQLSWIDTIIF | |
| | LSGVVNYDTDNFNKEILLDRSAGQNGAFKIKLDYVKKPIPESVFVQIL | |
| | EKLYEEDIGAGMYALYPYGGIMDEISESAIPFPHRAGILYELWYICSW | |
| | EKQEDNEKHLNWIRNIYNFMTPYVSQNPRLAYLNYRDLDIGINDPKN | |
| | PNNYTQARIWGEKYFGKNFDRLVKVKTLVDPNNFFRNEQSIPPLPRH | |
| | RH | |
| SP_CBGA | NIQTSIANPRENFLKCFSQYIPNNATNLKLVYTQNNPLYMSVLNSTIH | 293 |
| 1135_11_ | NLRFSSDTTPKPLVIVTPSHVSHIQGTILCSKKVGLQIRTRSGGHDSEG | |
| F02 | MSYISQVPFVIVDLRNMRSIKIDVHSQTAWVEAGATLGEVYYWVNE | |
| | KNESLSLAAGYCPTVCAGGHFGGGGYGPLMRSYGLAADNIIDAHLV | |
| | NVHGKVLDRKSMGEDLFWALRGGGAESFGIIVAWKIRLVAVPKSTM | |
| | FSVKKIMEIHELVKLVNKWQNIAYKYDKDLLLMTHFITRNITDNQGK | |
| | NKTAIHTYFSSVFLGGVDSLVDLMNKSFPELGIKKTDCRQLSWIDTIIF | |
| | YSQVVNYDTDNFNKEILLDRSAGQNGAFKIKLDYVKKPIPESVFVQIL | |
| | EKLYEEDIGAGMYALYPYGGIMDEISESAIPFPHRAGILYELWYICSW | |
| | EKQEDNEKHLNWIRNIYNFMTPYVSQNPRLAYLNYRDLDIGINDPKN | |
| | PNNYTQARIWGEKYFGKNFDRLVKVKTLVDPNNFFRNEQSIPPLPRH | |
| | RH | |
| SP_CBGA | NIQTSIANPRENFLKCFSQYIPNNATNLKLVYTQNNPLYMSVLNSTIH | 294 |
| 1139_01_ | NLRFSSDTTPKPLVIVTPSHVSHIQGTILCSKKVGLQIRTRSGGHDSEG | |
| D07 | MSYISQVPFVIVDLRNMRSIKIDVHSQTAWVEAGATLGEVYYWVNE | |
| | KNESLSLAAGYCPTVCAGGHFGGGGYGPLMRSYGLAADNIIDAHLV | |
| | NVHGKVLDRKSMGEDLFWALRGGGAESFGIIVAWKIRLVAVPKSTM | |
| | FSVKKIMEIHELVKLVNKWQNIAYKYDKDLLLMTHFITRNITDNQ | GK |
| | NKTAIHTYFSSVFLGGVDSLVDLMNKSFPELGIKKTDCRQLSWIDTIIF | |
| | YSGVVNKDTDNFNKEILLDRSAGQNGAFKIKLDYVKKPIPESVFVQIL | |
| | EKLYEEDIGAGMYALYPYGGIMDEISESAIPFPHRAGILYELWYICSW | |
| | EKQEDNEKHLNWIRNIYNFMTPYVSQNPRLAYLNYRDLDIGINDPKN | |
| | PNNYTQARIWGEKYFGKNFDRLVKVKTLVDPNNFFRNEQSIPPLPRH | |
| | RH | |
| SP_CBGA | NIQTSIANPRENFLKCFSQYIPNNATNLKLVYTQNNPLYMSVLNSTIH | 295 |
| 1135_10_ | NLRFSSDTTPKPLVIVTPSHVSHIQGTILCSKKVGLQIRTRSGGHDSEG | |
| B02 | MSYISQVPFVIVDLRNMRSIKIDVHSQTAWVEAGATLGEVYYWVNE | |
| | KNESLSLAAGYCPTVCAGGHFGGGGYGPLMRSYGLAADNIIDAHLV | |
| | NVHGKVLDRKSMGEDLFWALRGGGAESFGIIVAWKIRLVAVPKSTM | |
| | FSVKKIMEIHELVKLVNKWQNIAYKYDKDLLLMTHFITRNITDNQGK | |
| | NKTAIHTYFSSVFLGGVDSLVDLMNKSFPELGIKKTDCRQLSWIDTIIF | |
| | YSGVVNYDTDNFNKEILLDRSAGQNGAHKIKLDYVKKPIPESVFVQI | |
| | LEKLYEEDIGAGMYALYPYGGIMDEISESAIPFPHRAGILYELWYICS | |
| | WEKQEDNEKHLNWIRNIYNFMTPYVSQNPRLAYLNYRDLDIGINDP | |
| | KNPNNYTQARIWGEKYFGKNFDRLVKVKTLVDPNNFFRNEQSIPPLP | |
| | RHRH | |
| SP_CBGA | NIQTSIANPRENFLKCFSQYIPNNATNLKLVYTQNNPLYMSVLNSTIH | 296 |
| 1136_05_ | NLRFSSDTTPKPLVIVTPSHVSHIQGTILCSKKVGLQIRTRSGGHDSEG | |
| A05 | MSYISQVPFVIVDLRNMRSIKIDVHSQTAWVEAGATLGEVYYWVNE | |
| | KNESLSLAAGYCPTVCAGGHFGGGGYGPLMRSYGLAADNIIDAHLV | |
| | NVHGKVLDRKSMGEDLFWALRGGGAESFGIIVAWKIRLVAVPKSTM | |
| | FSVKKIMEIHELVKLVNKWQNIAYKYDKDLLLMTHFITRNITDNQGK | |
| | NKTAIHTYFSSVFLGGVDSLVDLMNKSFPELGIKKTDCRQLSWIDTIIF | |
| | YSGVVNYDTDNFNKEILLDRSAGQNGAFKYKLDYVKKPIPESVFVQI | |
| | LEKLYEEDIGAGMYALYPYGGIMDEISESAIPFPHRAGILYELWYICS | |
| | WEKQEDNEKHLNWIRNIYNFMTPYVSQNPRLAYLNYRDLDIGINDP | |
| | KNPNNYTQARIWGEKYFGKNFDRLVKVKTLVDPNNFFRNEQSIPPLP | |
| | RHRH | |
| 0285/asn0 | NIQTSIANPRENFLKCFSQYIPNNATNLKLVYTQNNPLYMSVLNSTIH | 297 |
| 80-2 | NLRFSSDTTPKPLVIVTPSHVSHIQGTILCSKKVGLQIRTRSGGHDSEG | |
| | MSYISQVPFVIVDLRNMRSIKIDVHSQTAWVEAGATLGEVYYWVNE | |
| | KNESLSLAAGYCPTVCAGGHFGGGGYGPLMRSYGLAADNIIDAHLV | |
| | NVHGKVLDRKSMGEDLFWALRGGGAESFGIIVAWKIRLVAVPKSTM | |
| | FSVKKIMEIHELVKLVNKWQNIAYKYDKDLLLMTHFITRNITDNQGK | |
| | NKTAIHTYFSSVFLGGVDSLVDLMNKSFPELGIKKTDCRQLSWIDTIIF | |
| | YSGVVNYDTDNFNKEILLDRSAGQNGAFKIKLDYVKKPIPESVFVQIL | |
| | EKLYEEDIGAGMYALYPYGGIMDEISESAIPFPHRAGILYELWYICSW | |
| | EKQEDNEKHLNWIRNIYNFMTPYVSQNPRLAYLNYRDLDIGINDPKN | |
| | PNNYTQARIWGEKYFGKNFDRLVKVKTLVDPNNFFRNEQSIPPLPRH | |
| | RH | |

### Example 26—CBCA Synthase Mutagenesis

[0444] To improve the performance of CBCA synthase, an enzyme mutagenesis experiment was conducted. The mutant CBCA C-terminal core enzyme contains 3 differences as the compared to CBDA Cannabis sativa C-terminal core enzyme, G74A, S insertion at 232, and M269T (when numbering the core sequence (without the signal sequence).

[0445] The starting CBCA N-terminal signal sequence and C-terminal coding sequence are included Table 29 below:

TABLE 29

| | length of | | |
|---|---|---|---|
| | amino acid | | SEQ ID |
| | sequence | CBCA amino acid sequence | NO: |
| N-terminal | 251 | MESVSSLFNIFSTIMVNYKSLVLALLSVSNLKYA | SEQ ID |
| signal | | RGAYAPKDPWSTLTPSATYKGGITDYSSSFGIAI | No: 434 |
| sequence | | EAVATSASSVASSKAKRAASQIGDGQVQAATTT | |
| | | AAVSKKSTAAAVSQITDGQVQAAKSTAAAVSQI | |
| | | TDGQVQAAKSTAAAVSQITDGQVQAAKSTAAA | |
| | | VSQITDGQVQAAKSTAAAASQISDGQVQATTST | |
| | | KAAASQITDGQIQASKTTSGASQVSDGQVQATA | |
| | | EVKDANDPVDVVSCNNNST | |
| C-terminal | 524 | NIQTSIANPRENFLKCFSQYIPNNATNLKLVYTQ | SEQ ID |
| core | | NNPLYMSVLNSTIHNLRFSSDTTPKPLVIVTPSH | No: 304 |
| enzyme: | | VSHIQATILCSKKVGLQIRTRSGGHDSEGMSYIS | |
| (signal | | QVPFVIVDLRNMRSIKIDVHSQTAWVEAGATLG | |
| sequence | | EVYYWVNEKNESLSLAAGYCPTVCAGGHFGGG | |
| removed) | | GYGPLMRSYGLAADNIIDAHLVNVHGKVLDRK | |
| | | SMGEDLFWALRGGGAESFGIIVAWKIRLVAVPS | |
| | | KSTMFSVKKIMEIHELVKLVNKWQNIAYKYDK | |
| | | DLLLTTHFITRNITDNQGKNKTAIHTYFSSVFLG | |
| | | GVDSLVDLMNKSFPELGIKKTDCRQLSWIDTIIF | |
| | | YSGVVNYDTDNFNKEILLDRSAGQNGAFKIKLD | |
| | | YVKKPIPESVFVQILEKLYEEDIGAGMYALYPYG | |
| | | GIMDEISESAIPFPHRAGILYELWYICSWEKQED | |
| | | NEKHLNWIRNIYNFMTPYVSQNPRLAYLNYRDL | |
| | | DIGINDPKNPNNYTQARIWGEKYFGKNFDRLVK | |
| | | VKTLVDPNNFFRNEQSIPPLPRHRH | |

[0446] Positions around the predicted active site of the Cannabis sativa CBDA enzyme were mutagenized in a random manner to increase the synthesis of CBCA. The parental plasmid for mutagenesis was the 0285/asn080-2 plasmid. Plasmids carrying mutant CBCA synthase genes were isolated and screened for CBCA synthase activity. The screen identified amino acid positions where substitutions for certain amino acids result in the formation of a highly specific CBCA synthase with elevated CBCA synthase activity. The parental plasmid and plasmids with mutant CBDA synthase gene were transformed into the yCBGA0513 or the yCBGA0523 strain.

[0447] Mutant CBCA synthases were screened using the following high throughput screening process: Colonies were inoculated into wells of a 96-well deep well plate. Each well contains 400 μl SC liquid medium (6.7 g/L Yeast Nitrogen Base, 1.6 g/L Amino Acid Drop Out mix without leucine, uracil, tryptophan and histidine, 22 g/L glucose, buffered to pH 6.0, supplemented with leucine, tryptophan, histidine and Hygromycin B). The inoculums were grown for 48 hours at 30° C. and shaken at 300 rpm with 50 mm shaking diameter. After a 48 hour growth period, 40 μl samples of these cultures were inoculated into 360 μl YPD-2400LA (10 g/L yeast extract, 20 g/L peptone, 20 g/L glucose and 240 mg/L olivetolic acid) medium. Then samples were grown for 48 hours at 30° C. and shaken at 300 rpm with 50 mm shaking diameter and 8 μl of 1200 mg/l OLA dissolved in EtOH was added to the samples. Finally, samples were grown for an additional 42 hours and were analyzed for cannabinoids.

[0448] Using the CBCA mutants of Table 30 in the above described screen resulted in improved titers as compared to yCBGA0513 or yCBGA0523 strains encoding the native Cannabis sativa CBCA. Each mutant's respective amino acid mutations and amino acid sequences, are included in Tables 30 below. (All mutation sites refer to the mutation site on CBCA's coding sequence without the signal sequence.)

TABLE 30
yCBGA_0523 mutant strains

| mutation site | | | |
|---|---|---|---|
| on CBCAs | | | |
| coding | | | |
| sequence | | | |
| without the | native | new | |
| signal | amino | amino | |
| sequence | acid | acid | |
| 1 | Asn | Asn | SEQ ID NO: 305 |
| 94 | Asp | Ser | SEQ ID NO: 306 |
| 94 | Asp | Asn | SEQ ID NO: 307 |
| 267 | Leu | Thr | SEQ ID NO: 308 |
| 461 | Leu | Arg | SEQ ID NO: 309 |
| 461 | Leu | Lys | SEQ ID NO: 310 |
| 1 | Asn | Leu | SEQ ID NO: 311 |
| 1 | Asn | Gly | SEQ ID NO: 312 |
| 54 | Ser | Arg | SEQ ID NO: 313 |
| 54 | Ser | Thr | SEQ ID NO: 314 |
| 95 | Ser | Gly | SEQ ID NO: 315 |
| 95 | Ser | Ala | SEQ ID NO: 316 |
| 82 | Val | Ala | SEQ ID NO: 317 |
| 82 | Val | Thr | SEQ ID NO: 318 |

### Example 27—Prenyl Transferase Site Directed Mutagenesis

[0449] To improve the performance of prenyl transferase (PT), a site directed mutagenesis experiment was conducted. The base gene for mutagenesis was a fusion construct: N-terminal part: yEVenus (a modified GFP protein); C-terminal part: GFP-dPT of strain 314 (SEQ ID NO: 27), a truncated Saccharomyces cerevisiae prenyl-transferase (the N-terminal 98 amino acid of the original prenyl-transferase was truncated), and the sequences are included Table 31 below:

TABLE 31

| | length of | | |
|---|---|---|---|
| | amino acid | | SEQ ID |
| | sequence | prenyltransferase amino acid sequence | NO: |
| Coding | 539 | MSKGEELFTGVVPILVELDGDVNGHKFSVSGEGE | SEQ ID |
| sequence | | GDATYGKLTLKLICTTGKLPVPWPTLVTTLGYGL | NO: 319 |
| | | QCFARYPDHMKQHDFFKSAMPEGYVQERTIFFKD | |
| | | DGNYKTRAEVKFEGDTLVNRIELKGIDFKEDGNIL | |
| | | GHKLEYNYNSHNVYITADKQKNGIKANFKIRHNI | |
| | | EDGGVQLADHYQQNTPIGDGPVLLPDNHYLSYQS | |
| | | ALSKDPNEKRDHMVLLEFVTAAGITHGMDELYK | |
| | | KILNFGHTCWKLQRPYVVKGMISIACGLFGRELF | |
| | | NNRHLFSWGLMWKAFFALVPILSFNFFAAIMNQI | |
| | | YDVDIDRINKPDLPLVSGEMSIETAWILSIIVALTG | |
| | | LIVTIKLKSAPLFVFIYIFGIFAGFAYSVPPIRWKQY | |
| | | PFTNFLITISSHVGLAFTSYSATTSALGLPFVWRPA | |
| | | FSFIIAFMTVMGMTIAFAKDISDIEGDAKYGVSTV | |
| | | ATKLGARNMTFVVSGVLLLNYLVSISIGIIWPQVF | |
| | | KSNIMILSHAILAFCLIFQTRELALANYASAPSRQF | |
| | | FEFIWLLYYAEYFVYVFI | |

[0450] Positions around the predicted active site of the native Saccharomyces cerevisiae prenyltransferase synthase enzyme were mutagenized in a random manner to increase the synthesis of prenyltransferase. The parental plasmid for mutagenesis was the 0285/asn080-2 plasmid. Plasmids carrying mutant prenyltransferase synthase genes were isolated and screened for prenyltransferase synthase activity. The screen identified amino acid positions where substitutions for certain amino acids result in the formation of a highly specific prenyltransferase synthase with elevated prenyltransferase synthase activity. The parental plasmid and plasmids with mutant CBDA synthase gene were transformed into the yCBGA0537 strain (yCBGA0537=yCBGA0523 where all PT were deleted).

[0451] Mutant prenyltransferase synthases were screened using the following high throughput screening process: Colonies were inoculated into wells of a 96-well deep well plate. Each well contains 400 μl SC liquid medium (6.7 g/L Yeast Nitrogen Base, 1.6 g/L Amino Acid Drop Out mix without leucine, uracil, tryptophan and histidine, 22 g/L glucose, buffered to pH 6.0, supplemented with leucine, tryptophan, histidine and Hygromycin B). The inoculums were grown for 48 hours at 30° C. and shaken at 300 rpm with 50 mm shaking diameter. After a 48 hour growth period, 40 μl samples of these cultures were inoculated into 360 μl YPD-2400LA (10 g/L yeast extract, 20 g/L peptone, 20 g/L glucose and 240 mg/L olivetolic acid) medium. Then samples were grown for 48 hours at 30° C. and shaken at 300 rpm with 50 mm shaking diameter and 8 μl of 12000 mg/l OLA dissolved in EtOH was added to the samples. Finally, samples were grown for an additional 42 hours and were analyzed for cannabinoids.

[0452] Using the prenyltransferase mutants of Table 32 in the above described screen resulted in similar or improved CBGA titers as compared to yCBGA0537 strains encoding the prenyltransferase. Each mutant's respective amino acid mutations and amino acid sequences, are included in Tables 32 below. (All mutation sites refer to the mutation site to the prenyltransferase in table 31 (SEQ ID 319).)

TABLE 32
yCBGA_0537 mutant strains

| | First | Last | | | | | |
|---|---|---|---|---|---|---|---|
| | position | position | | | | | |
| | of the | of the | | | | Mutants | |
| | mutation | mutation | | | | titer of | |
| | site on | site on | | Wild | | CBGA/ | |
| | PT's | PT's | Length | type | mutant | Wild Type | SEQ |
| Plasmid | coding | coding | of | amino | amino | titer of | ID |
| Constructs | sequence | sequence | mutation | acid(s) | acid(s) | CBGA | NO: |
| bCBGA_0537 | NA | NA | NA | NA | NA | 1.000 | 320 |
| 0383/asn001-1 | 239 | 241 | 3 | KIL | RVA | 0.889 | 321 |
| 0382/asn002-3 | 242 | 242 | 1 | N | D | 0.983 | 322 |
| 0382/asn001-2 | 242 | 242 | 1 | N | Q | 1.158 | 323 |
| 0383/asn002-3 | 244 | 245 | 2 | GH | LK | 0.957 | 324 |
| 0382/asn003-4 | 249 | 249 | 1 | K | R | 0.978 | 325 |
| 0382/asn009-3 | 264 | 264 | 1 | C | S | 1.316 | 326 |
| 0382/asn013-2 | 272 | 272 | 1 | F | I | 0.858 | 327 |
| 0382/asn016-4 | 275 | 275 | 1 | R | P | 0.877 | 328 |
| 0382/asn015-2 | 275 | 275 | 1 | R | K | 1.002 | 329 |
| 0382/asn019-2 | 283 | 283 | 1 | M | I | 0.894 | 330 |
| 0383/asn008-3 | 283 | 284 | 2 | MW | CF | 1.145 | 331 |
| 0382/asn020-1 | 287 | 287 | 1 | F | L | 1.071 | 332 |
| 0382/asn023-4 | 295 | 295 | 1 | s | c | 0.713 | 333 |
| 0382/asn026-1 | 298 | 298 | 1 | F | G | 1.003 | 334 |
| 0382/asn028-3 | 309 | 309 | 1 | V | I | 1.338 | 335 |
| 0382/asn029-2 | 314 | 314 | 1 | I | V | 0.729 | 336 |
| 0382/asn034-2 | 323 | 323 | 1 | S | A | 0.965 | 337 |
| 0382/asn033-3 | 323 | 323 | 1 | S | T | 1.057 | 338 |
| 0382/asn035-3 | 326 | 326 | 1 | M | I | 0.744 | 339 |
| 0382/asn036-1 | 329 | 329 | 1 | E | Q | 0.975 | 340 |
| 0382/asn037-4 | 333 | 333 | 1 | I | L | 0.789 | 341 |
| 0382/asn039-2 | 343 | 343 | 1 | L | F | 0.788 | 342 |
| 0382/asn041-2 | 348 | 348 | 1 | K | G | 0.796 | 343 |
| 0382/asn042-2 | 350 | 350 | 1 | K | N | 1.196 | 344 |
| 0382/asn044-2 | 354 | 354 | 1 | L | F | 0.870 | 345 |
| 0383/asn018-4 | 354 | 356 | 3 | LFV | VYI | 1.252 | 346 |
| 0382/asn045-3 | 357 | 357 | 1 | F | Y | 0.829 | 347 |
| 0382/asn047-2 | 360 | 360 | 1 | I | c | 1.043 | 348 |
| 0382/asn048-2 | 361 | 361 | 1 | F | L | 1.715 | 349 |
| 0382/asn049-3 | 363 | 363 | 1 | I | L | 1.098 | 350 |
| 0382/asn052-1 | 374 | 374 | 1 | I | L | 1.417 | 351 |
| 0382/asn055-3 | 378 | 378 | 1 | Q | R | 0.947 | 352 |
| 0382/asn057-3 | 382 | 382 | 1 | T | A | 0.821 | 353 |
| 0382/asn061-3 | 398 | 398 | 1 | S | V | 1.138 | 354 |
| 0382/asn062-5 | 402 | 402 | 1 | T | S | 0.787 | 355 |
| 0382/asn065-4 | 417 | 417 | 1 | S | T | 1.029 | 356 |
| 0382/asn066-1 | 421 | 421 | 1 | A | L | 0.791 | 357 |
| 0382/asn068-4 | 426 | 426 | 1 | M | F | 1.050 | 358 |
| 0382/asn069-1 | 428 | 428 | 1 | M | L | 0.819 | 359 |
| 0362/asn046-4 | 447 | 450 | 4 | VSTV | ISTI | 1.058 | 360 |
| | | | | (SEQ ID | (SEQ | | |
| | | | | NO: 430) | ID NO: | | |
| | | | | | 431) | | |
| 0382/asn075-1 | 448 | 448 | 1 | S | T | 0.972 | 361 |
| 0382/asn076-1 | 450 | 450 | 1 | V | L | 0.996 | 362 |
| 0383/asn032-3 | 460 | 462 | 3 | TFV | SWL | 1.057 | 363 |
| 0382/asn079-2 | 473 | 473 | 1 | V | A | 1.069 | 364 |
| 0382/asn080-1 | 476 | 476 | 1 | S | L | 1.088 | 365 |
| 0382/asn081-3 | 481 | 481 | 1 | W | M | 0.926 | 366 |
| 0382/asn082-4 | 484 | 484 | 1 | V | A | 0.974 | 367 |
| 0362/asn053-2 | 484 | 491 | 8 | VFKSNI | LFKSN | 1.142 | 368 |
| | | | | MI (SEQ | VMV | | |
| | | | | ID NO: | (SEQ | | |
| | | | | 432) | 433) | | |
| 0382/asn084-4 | 488 | 488 | 1 | N | S | 1.093 | 369 |
| 0382/asn085-2 | 489 | 489 | 1 | I | V | 0.994 | 370 |
| 0382/asn088-2 | 493 | 493 | 1 | S | A | 1.117 | 371 |
| 0382/asn089-3 | 495 | 495 | 1 | A | I | 0.821 | 372 |
| 0382/asn090-2 | 499 | 499 | 1 | F | S | 0.745 | 373 |
| 0382/asn091-3 | 500 | 500 | 1 | C | S | 1.092 | 374 |
| 0382/asn092-3 | 503 | 503 | 1 | F | Y | 1.421 | 375 |
| 0382/asn094-1 | 510 | 510 | 1 | L | K | 0.799 | 376 |
| 0382/asn098-2 | 520 | 520 | 1 | Q | S | 0.769 | 377 |
| 0382/asn101-3 | 525 | 525 | 1 | I | L | 1.378 | 378 |
| 0382/asn102-2 | 527 | 527 | 1 | L | I | 0.741 | 379 |

[0453] Using the prenyltransferase mutant combinations of Tables 33-41 in the above described screen resulted in similar or improved CBGA titers as compared to yCBGA0537 strains encoding the native Saccharomyces cerevisiae prenyltransferase. Each mutant's respective amino acid mutations and amino acid sequences, are included in Tables 33-41 below. (All mutation sites refer to the mutation site on prenyltransferase's coding sequence without the wild-type signal sequence.)

TABLE 33
Combination “Combination Mutant Strain 1”
yCBGA_0537 combination mutant strains with multiple plasmid
constructs

| | | Last | | | |
|---|---|---|---|---|---|
| | First | position | | | |
| | position | of the | | | |
| | of the | mutation | | | |
| | mutation | site on | | | |
| | site on | PT's | | | |
| | PT's | coding | | | |
| | coding | sequence | | | |
| | sequence | without | | | |
| | without | the | Length | Wild type | mutant |
| Plasmid | the signal | signal | of | amino | amino |
| Constructs | sequence | sequence | mutation | acid | acid |
| 0382/asn001-2 | 242 | 242 | 1 | N | Q |
| 0382/asn003-4 | 249 | 249 | 1 | K | R |
| 0383/asn008-3 | 283 | 284 | 2 | MW | CF |
| 0382/asn020-1 | 287 | 287 | 1 | F | L |

TABLE 34
Combination “Combination Mutant Strain 2”
yCBGA_0537 combination mutant strains with multiple plasmid
constructs

| | | Last | | | |
|---|---|---|---|---|---|
| | First | position | | | |
| | position | of the | | | |
| | of the | mutation | | | |
| | mutation | site on | | | |
| | site on | PT's | | | |
| | PT's | coding | | | |
| | coding | sequence | | | |
| | sequence | without | | | |
| | without | the | Length | Wild type | mutant |
| Plasmid | the signal | signal | of | amino | amino |
| Constructs | sequence | sequence | mutation | acid | acid |
| 0383/asn001-1 | 239 | 241 | 3 | KIL | RVA |
| 0382/asn001-2 | 242 | 242 | 1 | N | Q |
| 0383/asn002-3 | 244 | 245 | 2 | GH | LK |
| 0382/asn003-4 | 249 | 249 | 1 | K | R |
| 0382/asn009-3 | 264 | 264 | 1 | C | S |
| 0382/asn013-2 | 272 | 272 | 1 | F | I |
| 0382/asn015-2 | 275 | 275 | 1 | R | K |
| 0383/asn008-3 | 283 | 284 | 2 | MW | CF |
| 0382/asn020-1 | 287 | 287 | 1 | F | L |

TABLE 35
Combination “Combination Mutant Strain 3”
yCBGA_0537 combination mutant strains with multiple plasmid
constructs

| | | Last | | | |
|---|---|---|---|---|---|
| | First | position | | | |
| | position | of the | | | |
| | of the | mutation | | | |
| | mutation | site on | | | |
| | site on | PT's | | | |
| | PT's | coding | | | |
| | coding | sequence | | | |
| | sequence | without | | | |
| | without | the | Length | Wild type | mutant |
| Plasmid | the signal | signal | of | amino | amino |
| Constructs | sequence | sequence | mutation | acid | acid |
| 0382/asn026-1 | 298 | 298 | 1 | F | G |
| 0382/asn028-3 | 309 | 309 | 1 | V | I |
| 0382/asn033-3 | 323 | 323 | 1 | S | T |
| 0382/asn037-4 | 333 | 333 | 1 | I | L |

TABLE 36
Combination “Combination Mutant Strain 4”
yCBGA_0537 combination mutant strains with multiple plasmid
constructs

| | | Last | | | |
|---|---|---|---|---|---|
| | First | position | | | |
| | position | of the | | | |
| | of the | mutation | | | |
| | mutation | site on | | | |
| | site on | PT's | | | |
| | PT's | coding | | | |
| | coding | sequence | | | |
| | sequence | without | | | |
| | without | the | Length | Wild type | mutant |
| Plasmid | the signal | signal | of | amino | amino |
| Constructs | sequence | sequence | mutation | acid | acid |
| 0382/asn023-4 | 295 | 295 | 1 | S | C |
| 0382/asn026-1 | 298 | 298 | 1 | F | G |
| 0382/asn028-3 | 309 | 309 | 1 | V | I |
| 0382/asn029-2 | 314 | 314 | 1 | I | V |
| 0382/asn033-3 | 323 | 323 | 1 | S | T |
| 0382/asn035-3 | 326 | 326 | 1 | M | I |
| 0382/asn036-1 | 329 | 329 | 1 | E | Q |
| 0382/asn037-4 | 333 | 333 | 1 | I | L |
| 0382/asn039-2 | 343 | 343 | 1 | L | F |

TABLE 37
Combination “Combination Mutant Strain 5”
yCBGA_0537 combination mutant strains with multiple plasmid
constructs

| | | Last | | | |
|---|---|---|---|---|---|
| | First | position | | | |
| | position | of the | | | |
| | of the | mutation | | | |
| | mutation | site on | | | |
| | site on | PT's | | | |
| | PT's | coding | | | |
| | coding | sequence | | | |
| | sequence | without | | | |
| | without | the | Length | Wild type | mutant |
| Plasmid | the signal | signal | of | amino | amino |
| Constructs | sequence | sequence | mutation | acid | acid |
| 0383/asn018-4 | 354 | 356 | 3 | LFV | VYI |
| 0382/asn048-2 | 361 | 361 | 1 | F | L |
| 0382/asn049-3 | 363 | 363 | 1 | I | L |
| 0382/asn052-1 | 374 | 374 | 1 | I | L |

TABLE 38
Combination “Combination Mutant Strain 6”
yCBGA_0537 combination mutant strains with multiple plasmid
constructs

| | | Last | | | |
|---|---|---|---|---|---|
| | First | position | | | |
| | position | of the | | | |
| | of the | mutation | | | |
| | mutation | site on | | | |
| | site on | PT's | | | |
| | PT's | coding | | | |
| | coding | sequence | | | |
| | sequence | without | | | |
| | without | the | Length | Wild type | mutant |
| Plasmid | the signal | signal | of | amino | amino |
| Constructs | sequence | sequence | mutation | acid | acid |
| 0382/asn062-5 | 402 | 402 | 1 | T | S |
| 0382/asn065-4 | 417 | 417 | 1 | S | T |
| 0382/asn066-1 | 421 | 421 | 1 | A | L |
| 0382/asn068-4 | 426 | 426 | 1 | M | F |

TABLE 39
Combination “Combination Mutant Strain 7”
yCBGA_0537 combination mutant strains with multiple plasmid
constructs

| | | Last | | | |
|---|---|---|---|---|---|
| | First | position | | | |
| | position | of the | | | |
| | of the | mutation | | | |
| | mutation | site on | | | |
| | site on | PT's | | | |
| | PT's | coding | | | |
| | coding | sequence | | | |
| | sequence | without | | | |
| | without | the | Length | Wild type | mutant |
| Plasmid | the signal | signal | of | amino | amino |
| Constructs | sequence | sequence | mutation | acid | acid |
| 0382/asn075-1 | 448 | 448 | 1 | S | T |
| 0382/asn076-1 | 450 | 450 | 1 | V | L |
| 0383/asn032-3 | 460 | 462 | 3 | TFV | SWL |
| 0382/asn079-2 | 473 | 473 | 1 | V | A |
| 0382/asn085-2 | 489 | 489 | 1 | I | V |

TABLE 40
Combination “Combination Mutant Strain 8”
yCBGA_0537 combination mutant strains with multiple plasmid
constructs

| | | Last | | | |
|---|---|---|---|---|---|
| | First | position | | | |
| | position | of the | | | |
| | of the | mutation | | | |
| | mutation | site on | | | |
| | site on | PT's | | | |
| | PT's | coding | | | |
| | coding | sequence | | | |
| | sequence | without | Length | | |
| | without | the | of | Wild type | mutant |
| Plasmid | the signal | signal | muta- | amino | amino |
| Constructs | sequence | sequence | tion | acid | acid |
| 0362/asn046-4 | 447 | 450 | 4 | VSTV | ISTI |
| 0383/asn032-3 | 460 | 462 | 3 | TFV | SWL |
| 0382/asn079-2 | 473 | 473 | 1 | V | A |
| 0382/asn080-1 | 476 | 476 | 1 | S | L |
| 0382/asn081-3 | 481 | 481 | 1 | W | M |
| 0362/asn053-2 | 484 | 491 | 8 | VFKSNI | LFKSN |
| | | | | MI | VMV |

TABLE 41
Combination “Combination Mutant Strain 9”
yCBGA_0527 comination mutant strains with multiple plasmid
constructs

| | First | Last | | | |
|---|---|---|---|---|---|
| | position | position | | | |
| | of the | of the | | | |
| | mutantion | mutation | | | |
| | site on | site on | | | |
| | PT's | PT's | | | |
| | coding | coding | | | |
| | sequence | sequence | | | |
| | without | without | | | |
| | the | the | Length | Wild type | mutant |
| Plasmid | signal | signal | of | amino | amino |
| Constructs | sequence | sequence | mutation | acid | acid |
| 0382/asn089-3 | 495 | 495 | 1 | A | I |
| 0382/asn091-3 | 500 | 500 | 1 | C | S |
| 0382/asn092-3 | 503 | 503 | 1 | F | Y |
| 0382/asn101-3 | 525 | 525 | 1 | I | L |

The application's sequence listing, which the Patent Office published only in electronic form, follows.

SEQUENCE LISTING (435 sequences)

SEQ ID NO: 1 - protein, 398 aa, Artificial Sequence
  source: /note="Description of Artificial Sequence: Synthetic polypeptide"
  source: /note="New/Synthetic sequence"
MGLSLVCTFSFQTNYHTLLNPHNKNPKNSLLSYQHPKTPIIKSSYDNFPSKYCLTKNFHLLGLNSHNRISSQSRSIRAGSDQIEGSPHHESDNSIATKILNFGHTCWKLQRPYVVKGMISIACGLFGRELFNNRHLFSWGLMWKAFFALVPILSFNFFAAIMNQIYDVDIDRINKPDLPLVSGEMSIETAWILSIIVALTGLIVTIKLKSAPLFVFIYIFGIFAGFAYSVPPIRWKQYPFTNFLITISSHVGLAFTSYSATTSALGLPFVWRPAFSFIIAFMTVMGMTIAFAKDISDIEGDAKYGVSTVATKLGARNMTFVVSGVLLLNYLVSISIGIIWPQVFKSNIMILSHAILAFCLIFQTRELALANYASAPSRQFFEFIWLLYYAEYFVYVFI

SEQ ID NO: 2 - DNA, 1197 bp, Artificial Sequence
  source: /note="Description of Artificial Sequence: Synthetic polynucleotide"
  source: /note="New/Synthetic sequence"
atgggtttatctttggtctgtactttttcatttcaaactaattaccatacattgttaaatccacataataagaaccctaaaaattctttgttgtcatatcaacatccaaaaactccaattattaaatcttcttatgataattttccatctaagtactgtttgactaaaaatttccatttgttaggtttaaattctcataatagaatttcttcacaatcaagatcaattagagctggttctgatcaaattgaaggttcaccacatcatgaatctgataactcaatcgcaactaaaattttgaactttggtcatacatgttggaaattgcaaagaccatacgttgttaagggtatgatttctattgcttgtggtttatttggtagagaattgtttaataacagacatttgttttcttggggtttgatgtggaaagcatttttcgcattagttccaatcttgtcttttaatttctttgctgcaatcatgaaccaaatatatgatgttgatattgatagaattaataagccagatttgccattggtttctggtgaaatgtcaatcgaaactgcttggattttatctatcatcgttgcattgactggtttgatcgttacaattaaattaaaatcagctccattgttcgtttttatatatatcttcggtatcttcgctggttttgcatactctgttccaccaattagatggaagcaatacccttttactaatttcttgatcacaatttcttcacatgttggtttggcttttacttcttactcagctactacatctgcattaggtttgccatttgtttggaggccagctttttcttttattatcgcttttatgactgttatgggtatgacaatcgctttcgcaaaggatatctctgatattgaaggtgacgctaaatacggtgtttcaactgttgctacaaaattgggtgcaagaaacatgactttcgttgtttctggtgttttgttgttgaactatttggtttctatctcaatcggtattatttggccacaagtttttaaatctaacatcatgatcttgtcacatgctatcttggcattctgtttgatcttccaaacaagagaattagctttggcaaattatgcttctgcaccatcaagacaatttttcgagtttatttggttgttgtactacgctgaatattttgtttacgtttttatttga

SEQ ID NO: 3 - DNA, 8794 bp, Artificial Sequence
  source: /note="Description of Artificial Sequence: Synthetic polynucleotide"
  source: /note="RUNM000898_511.1"
ttttggttttaattttcttggagtgtaatcaaaaattaacaacttttcccagaatgatctgtaaacgtcaccaaaaccaacatgtgctggatgaataatgtaatcttggatagtttcaacagattcgaatgtaacttcaacgatatgagtgtaaccttcttctttcttttgtgtaacatctttaccccaataaacatccttcatagctgggatgatgttaaccaaattaacgtaagtcttgaaaaattcttctttttgtgcttctgtaatttcatctttaaacttcaaaacgatcaaatgcttaacagccatttatattgaattttcaaaaattcttactttttttttggatggacgcaaagaagtttaataatcatattacatggcattaccaccatatacatatccatatctaatcttacttatatgttgtggaaatgtaaagagccccattatcttagcctaaaaaaaccttctctttggaactttcagtaatacgcttaactgctcattgctatattgaagtacggattagaagccgccgagcgggcgacagccctccgacggaagactctcctccgtgcgtcctcgtcttcaccggtcgcgttcctgaaacgcagatgtgcctcgcgccgcactgctccgaacaataaagattctacaatactagcttttatggttatgaagaggaaaaattggcagtaacctggccccacaaaccttcaaattaacgaatcaaattaacaaccataggatgataatgcgattagttttttagccttatttctggggtaattaatcagcgaagcgatgatttttgatctattaacagatatataaatggaaaagctgcataaccactttaactaatactttcaacattttcagtttgtattacttcttattcaaatgtcataaaagtatcaacaaaaaattgttaatatacctctatactttaacgtcaaggagaaaaaactataatgaatcatttgagagctgaaggtccagcatcagttttggctattggtactgcaaacccagaaaacatcttgatccaagatgaatttccagattattacttcagagttactaagtcagaacatatgacacaattgaaggaaaagtttagaaagatctgtgataagtctatgattagaaaaagaaattgtttcttgaacgaagaacatttgaagcaaaacccaagattagttgaacatgaaatgcaaacattggatgctagacaagatatgttggttgttgaagttccaaagttgggtaaagatgcatgtgctaaagcaattaaagaatggggtcaaccaaagtctaagatcactcatttgatttttacatcagcatctactacagatatgccaggtgctgattaccattgtgcaaagttgttgggtttgtcaccatctgttaagagagttatgatgtaccaattaggttgttacggtggtggtactgttttgagaatcgctaaggatatcgcagaaaacaataagggtgctagagtcttggcagtttgttgtgatatcatggcttgtttgtttagaggtccatcagattctgatttggaattgttagttggtcaagctatttttggtgacggtgctgcagctgttattgttggtgcagaaccagatgaatcagttggtgaaagaccaatcttcgaattagtttcaactggtcaaacaattttgccaaattctgaaggtacaattggtggtcatatcagagaagctggtttgatcttcgatttgcataaagatgttccaatgttgatctctaacaacatcgaaaagtgtttgatcgaagcttttactccaatcggtatctcagattggaactctattttctggattacacatccaggtggtaaagcaatcttggataaggttgaagaaaaattggatttgaagaaagaaaaatttgttgattcaagacatgttttgtctgaacatggtaacatgtcttcatctactgttttgttcgttatggatgaattgagaaagagatcattagaagagggtaaatctactacaggtgacggttttgaatggggtgttttatttggttttggtccaggtttgacagttgaaagagttgttgttagatctgttccaattaaatactaagtgaatttactttaaatcttgcatttaaataaattttctttttatagctttatgacttagtttcaatttatatactattttaatgacattttcgattcattgattgaaagctttgtgttttttcttgatgcgctattgcattgttcttgtctttttcgccacatgtaatatctgtagtagatacctgatacattgtggatgctgagtgaaattttagttaataatggaggcgctcttaataattttggggatattggcttttttttttaaagtttacaaatgaattttttccgccaggataacgattctgaagttactcttagcgttcctatcggtacagccatcaaatcatgcctataaatcatgcctatatttgcgtgcagtcagtatcatctacagaatttcatcattttttttttattcttttttttgatttcggtttccttgaaatttttttgattcggtaatctccgaacagaaggaagaacgaaggaaggagcacagacttagattggtatatatacgcatatgtagtgttgaagaaacatgaaattgcccagtattcttaacccaactgcacagaacaaaaacctgcaggaaacgaagataaatcatgtcgaaagctacatataaggaacgtgctgctactcatcctagtcctgttgctgccaagctatttaatatcatgcacgaaaagcaaacaaacttgtgtgcttcattggatgttcgtaccaccaaggaattactggagttagttgaagcattaggtcccaaaatttgtttactaaaaacacatgtggatatcttgactgatttttccatggagggcacagttaagccgctaaaggcattatccgccaagtacaattttttactcttcgaagacagaaaatttgctgacattggtaatacagtcaaattgcagtactctgcgggtgtatacagaatagcagaatgggcagacattacgaatgcacacggtgtggtgggcccaggtattgttagcggtttgaagcaggcggcagaagaagtaacaaaggaacctagaggccttttgatgttagcagaattgtcatgcaagggctccctatctactggagaatatactaagggtactgttgacattgcgaagagcgacaaagattttgttatcggctttattgctcaaagagacatgggtggaagagatgaaggttacgattggttgattatgacacccggtgtgggtttagatgacaagggagacgcattgggtcaacagtatagaaccgtggatgatgtggtctctacaggatctgacattattattgttggaagaggactatttgcaaagggaagggatgctaaggtagagggtgaacgttacagaaaagcaggctgggaagcatatttgagaagatgcggccagcaaaactaaaaaactgtattataagtaaatgcatgtatactaaactcacaaattagagcttcaatttaattatatcagttattacccaatcagatctgctgcattaatgaatcggccaacgcgcggggagaggcggtttgcgtattgggcgctcttccgcttcctcgctcactgactcgctgcgctcggtcgttcggctgcggcgagcggtatcagcatcgatgaattccacggactatagactatactagtatactccgtctactgtacgatacacttccgctcaggtccttgtcctttaacgaggccttaccactcttttgttactctattgatccagctcagcaaaggcagtgtgatctaagattctatcttcgcgatgtagtaaaactagctagaccgagaaagagactagaaatgcaaaaggcacttctacaatggctgccatcattattatccgatgtgacgctgcagcttctcaatgatattcgaatacgctttgaggagatacagcctaatatccgacaaactgttttacagatttacgatcgtatttgttacccatcattgaattttgaacatccgaacctgggagttttccctgaaacagatagtatatttgaacctgtataataatatatagtctagcgctttacggaagacaatgtatgtatttcggttcctggagaaactattgcatctattgcataggtaatcttgcacgtcgcatccccggttcattttctgcgtttccatcttgcacttcaatagcatatctttgttaacgaagcatctgtgcttcattttgtagaacaaaaatgcaacgcgagagcgctaatttttcaaacaaagaatctgagctgcatttttacagaacagaaatgcaacgcgaaagcgctattttaccaacgaagaatctgtgcttcatttttgtaaaacaaaaatgcaacgcgagagcgctaatttttcaaacaaagaatctgagctgcatttttacagaacagaaatgcaacgcgagagcgctattttaccaacaaagaatctatacttcttttttgttctacaaaaatgcatcccgagagcgctatttttctaacaaagcatcttagattactttttttctcctttgtgcgctctataatgcagtctcttgataactttttgcactgtaggtccgttaaggttagaagaaggctactttggtgtctattttctcttccataaaaaaagcctgactccacttcccgcgtttactgattactagcgaagctgcgggtgcattttttcaagataaaggcatccccgattatattctataccgatgtggattgcgcatactttgtgaacagaaagtgatagcgttgatgattcttcattggtcagaaaattatgaacggtttcttctattttgtctctatatactacgtataggaaatgtttacattttcgtattgttttcgattcactctatgaatagttcttactacaatttttttgtctaaagagtaatactagagataaacataaaaaatgtagaggtcgagtttagatgcaagttcaaggagcgaaaggtggatgggtaggttatatagggatatagcacagagatatatagcaaagagatacttttgagcaatgtttgtggaagcggtattcgcaatattttagtagctcgttacagtccggtgcgtttttggttttttgaaagtgcgtcttcagagcgcttttggttttcaaaagcgctctgaagttcctatactttctagagaataggaacttcggaataggaacttcaaagcgtttccgaaaacgagcgcttccgaaaatgcaacgcgagctgcgcacatacagctcactgttcacgtcgcacctatatctgcgtgttgcctgtatatatatatacatgagaagaacggcatagtgcgtgtttatgcttaaatgcgtacttatatgcgtctatttatgtaggatgaaaggtagtctagtacctcctgtgatattatcccattccatgcggggtatcgtatgcttccttcagcactaccctttagctgttctatatgctgccactcctcaattggattagtctcatccttcaatgctatcatttcctttgatattggatcatatgcatagtaccgagaaactagtgcgaagtagtgatcaggtattgctgttatctgatgagtatacgttgtcctggccacggcagaagcacgcttatcgctccaatttcccacaacattagtcaactccgttaggcccttcattgaaagaaatgaggtcatcaaatgtcttccaatgtgagattttgggccattttttatagcaaagattgaataaggcgcatttttcttcaaagctttattgtacgatctgactaagttatcttttaataattggtattcctgtttattgcttgaagaattgccggtcctatttactcgttttaggactggttcagaattcatcgatgctcactcaaaggcggtaatacggttatccacagaatcaggggataacgcaggaaagaacatgtgagcaaaaggccagcaaaaggccaggaaccgtaaaaaggccgcgttgctggcgtttttccataggctccgcccccctgacgagcatcacaaaaatcgacgctcaagtcagaggtggcgaaacccgacaggactataaagataccaggcgtttccccctggaagctccctcgtgcgctctcctgttccgaccctgccgcttaccggatacctgtccgcctttctcccttcgggaagcgtggcgctttctcatagctcacgctgtaggtatctcagttcggtgtaggtcgttcgctccaagctgggctgtgtgcacgaaccccccgttcagcccgaccgctgcgccttatccggtaactatcgtcttgagtccaacccggtaagacacgacttatcgccactggcagcagccactggtaacaggattagcagagcgaggtatgtaggcggtgctacagagttcttgaagtggtggcctaactacggctacactagaagacagtatttggtatctgcgctctgctgaagccagttaccttcggaaaaagagttggtagctcttgatccggcaaacaaaccaccgctggtagcggtggtttttttgtttgcaagcagcagattacgcgcagaaaaaaaggatctcaagaagatcctttgatcttttctacggggtctgacgctcagtggaacgaaaactcacgttaagggattttggtcatgagattatcaaaaaggatcttcacctagatccttttaaattaaaaatgaagttttaaatcaatctaaagtatatatgagtaaacttggtctgacagttaccaatgcttaatcagtgaggcacctatctcagcgatctgtctatttcgttcatccatagttgcctgactccccgtcgtgtagataactacgatacgggagggcttaccatctggccccagtgctgcaatgataccgcgagacccacgctcaccggctccagatttatcagcaataaaccagccagccggaagggccgagcgcagaagtggtcctgcaactttatccgcctccatccagtctattaattgttgccgggaagctagagtaagtagttcgccagttaatagtttgcgcaacgttgttgccattgctacaggcatcgtggtgtcacgctcgtcgtttggtatggcttcattcagctccggttcccaacgatcaaggcgagttacatgatcccccatgttgtgcaaaaaagcggttagctccttcggtcctccgatcgttgtcagaagtaagttggccgcagtgttatcactcatggttatggcagcactgcataattctcttactgtcatgccatccgtaagatgcttttctgtgactggtgagtactcaaccaagtcattctgagaatagtgtatgcggcgaccgagttgctcttgcccggcgtcaatacgggataataccgcgccacatagcagaactttaaaagtgctcatcattggaaaacgttcttcggggcgaaaactctcaaggatcttaccgctgttgagatccagttcgatgtaacccactcgtgcacccaactgatcttcagcatcttttactttcaccagcgtttctgggtgagcaaaaacaggaaggcaaaatgccgcaaaaaagggaataagggcgacacggaaatgttgaatactcatactcttcctttttcaatattattgaagcatttatcagggttattgtctcatgagcggatacatatttgaatgtatttagaaaaataaacaaataggggttccgcgcacatttccccgaaaagtgccacctgacgtctaagaaaccattattatcatgacattaacctataaaaataggcgtatcacgaggccctttcgtctcgcgcgtttcggtgatgacggtgaaaacctctgacacatgcagctcccggagacggtcacagcttgtctgtaagcggatgccgggagcagacaagcccgtcagggcgcgtcagcgggtgttggcgggtgtcggggctggcttaactatgcggcatcagagcagattgtactgagagtgcaccatatgcggtgtgaaataccgcacagatgcgtaaggagaaaataccgcatcaggcgccattcgccattcaggctgcgcaactgttgggaagggcgatcggtgcgggcctcttcgctattacgccagctggcgaaagggggatgtgctgcaaggcgattaagttgggtaacgccagggttttcccagtcacgacgttgtaaaacgacggccagtgaattgcggccgcatcgatggtgggatgagcttggagcaggaagaatacactatactggatctaaagagtacaatagatggataagaatattggcagcgcaaaaaggcttcaagcttacacaacacggtttatttcgaaataatatccttctcgaaagctttaacgaacgcagaattttcgagttattaaacttaaaatacgctgaacccgaacatagaaatatcgaatgggaaaaaaaaactgcataaaggcattaaaagaggagcgaatttttttttaataaaaatcttaataatcattaaaagataaataatagtctatatatacgtatataaataaaaaatattcaaaaaataaaataaactattattttagcgtaaaggatggggaaagagaaaagaaaaaaattgatctatcgatttcaattcaattcaattta

SEQ ID NO: 4 - DNA, 11346 bp, Artificial Sequence
  source: /note="Description of Artificial Sequence: Synthetic polynucleotide"
  source: /note="bCBHA0096 vector"
gattaatataattatataaaaatattatcttcttttctttatatctagtgttatgtaaaataaattgatgactacggaaagcttttttatattgtttctttttcattctgagccacttaaatttcgtgaatgttcttgtaagggacggtagatttacaagtgatacaacaaaaagcaaggcgctttttctaataaaaagaagaaaagcatttaacaattgaacacctctatatcaacgaagaatattactttgtctctaaatccttgtaaaatgtgtacgatctctatatgggttactcataagtgtaccgaagactgcattgaaagtttatgttttttcactggaggcgtcattttcgcgttgagaacaattgtcctgtacttccttgttcatgtgtgttcaaaaacgttatatttataggataattatactctatttctcaacaagtaattggttgtttggccgagcggtctaaggcgcctgattcaagaaatatcttgaccgcagttaactgtgggaatactcaggtatcgtaagatgcaagagttcgaatctcttagcaaccattatttttttcctcaacataacgagaacacacaggggcgctatcgcacagaatcaaattcgatgactggaaattttttgttaatttcagaggtcgcctgacgcatatacctttttcaactgaaaaattgggagaaaaaggaaaggtgagagcgccggaaccggcttttcatatagaatagagaagcgttcatgactaaatgcttgcatcacaatacttgaagttgacaatattatttaaggacctattgttttttccaataggtggttagcaatcgtcttactttctaacttttcttaccttttacatttcagcaatatatatatatatttcaaggatataccattctaatgtctgcccctaagaagatcgtcgttttgccaggtgaccacgttggtcaagaaatcacagccgaagccattaaggttcttaaagctatttctgatgttcgttccaatgtcaagttcgatttcgaaaatcatttaattggtggtgctgctatcgatgctacaggtgttccacttccagatgaggcgctggaagcctccaagaaggctgatgccgttttgttaggtgctgtgggtggtcctaaatggggtaccggtagtgttagacctgaacaaggtttactaaaaatccgtaaagaacttcaattgtacgccaacttaagaccatgtaactttgcatccgactctcttttagacttatctccaatcaagccacaatttgctaaaaatactgacttcgttgttgtcagagaattagtgggaggtatttactttggtaagagaaaggaagacgatggtgatggtgtcgcttgggatagtgaacaatacaccgttccagaagtgcaaagaatcacaagaatggccgctttcatggccctacaacatgagccaccattgcctatttggtccttggataaagctaatgttttggcctcttcaagattatggagaaaaactgtggaggaaaccatcaagaacgaattccctacattgaaggttcaacatcaattgattgattctgccgccatgatcctagttaagaacccaacccacctaaatggtattataatcaccagcaacatgtttggtgatatcatctccgatgaagcctccgttatcccaggttccttgggtttgttgccatctgcgtccttggcctctttgccagacaagaacaccgcatttggtttgtacgaaccatgccacggttctgctccagatttgccaaagaataaggtcaaccctatcgccactatcttgtctgctgcaatgatgttgaaattgtcattgaacttgcctgaagaaggtaaggccattgaagatgcagttaaaaaggttttggatgcaggtatcagaactggtgatttaggtggttccaacagtaccaccgaagtcggtgatgctgtcgccgaagaagttaagaaaatccttgcttaaaaagattctctttttttatgatatttgtacataaactttataaatgaaattcataatagaaacgacacgaaattacaaaatggaatatgttcatagggtagacgaaactatatacgcaatctacatacatttatcaagaaggagaaaaaggaggatgtaaaggaatacaggtaagcaaattgatactaatggctcaacgtgataaggaaaaagaattgcactttaacattaatattgacaaggaggagggcaccacacaaaaagttacagatctgctgcattaatgaatcggccaacgcgcggggagaggcggtttgcgtattgggcgctcttccgcttcctcgctcactgactcgctgcgctcggtcgttcggctgcggcgagcggtatcagcatcgatgaattccacggactatagactatactagtatactccgtctactgtacgatacacttccgctcaggtccttgtcctttaacgaggccttaccactcttttgttactctattgatccagctcagcaaaggcagtgtgatctaagattctatcttcgcgatgtagtaaaactagctagaccgagaaagagactagaaatgcaaaaggcacttctacaatggctgccatcattattatccgatgtgacgctgcagcttctcaatgatattcgaatacgctttgaggagatacagcctaatatccgacaaactgttttacagatttacgatcgtatttgttacccatcattgaattttgaacatccgaacctgggagttttccctgaaacagatagtatatttgaacctgtataataatatatagtctagcgctttacggaagacaatgtatgtatttcggttcctggagaaactattgcatctattgcataggtaatcttgcacgtcgcatccccggttcattttctgcgtttccatcttgcacttcaatagcatatctttgttaacgaagcatctgtgcttcattttgtagaacaaaaatgcaacgcgagagcgctaatttttcaaacaaagaatctgagctgcatttttacagaacagaaatgcaacgcgaaagcgctattttaccaacgaagaatctgtgcttcatttttgtaaaacaaaaatgcaacgcgagagcgctaatttttcaaacaaagaatctgagctgcatttttacagaacagaaatgcaacgcgagagcgctattttaccaacaaagaatctatacttcttttttgttctacaaaaatgcatcccgagagcgctatttttctaacaaagcatcttagattactttttttctcctttgtgcgctctataatgcagtctcttgataactttttgcactgtaggtccgttaaggttagaagaaggctactttggtgtctattttctcttccataaaaaaagcctgactccacttcccgcgtttactgattactagcgaagctgcgggtgcattttttcaagataaaggcatccccgattatattctataccgatgtggattgcgcatactttgtgaacagaaagtgatagcgttgatgattcttcattggtcagaaaattatgaacggtttcttctattttgtctctatatactacgtataggaaatgtttacattttcgtattgttttcgattcactctatgaatagttcttactacaatttttttgtctaaagagtaatactagagataaacataaaaaatgtagaggtcgagtttagatgcaagttcaaggagcgaaaggtggatgggtaggttatatagggatatagcacagagatatatagcaaagagatacttttgagcaatgtttgtggaagcggtattcgcaatattttagtagctcgttacagtccggtgcgtttttggttttttgaaagtgcgtcttcagagcgcttttggttttcaaaagcgctctgaagttcctatactttctagagaataggaacttcggaataggaacttcaaagcgtttccgaaaacgagcgcttccgaaaatgcaacgcgagctgcgcacatacagctcactgttcacgtcgcacctatatctgcgtgttgcctgtatatatatatacatgagaagaacggcatagtgcgtgtttatgcttaaatgcgtacttatatgcgtctatttatgtaggatgaaaggtagtctagtacctcctgtgatattatcccattccatgcggggtatcgtatgcttccttcagcactaccctttagctgttctatatgctgccactcctcaattggattagtctcatccttcaatgctatcatttcctttgatattggatcatatgcatagtaccgagaaactagtgcgaagtagtgatcaggtattgctgttatctgatgagtatacgttgtcctggccacggcagaagcacgcttatcgctccaatttcccacaacattagtcaactccgttaggcccttcattgaaagaaatgaggtcatcaaatgtcttccaatgtgagattttgggccattttttatagcaaagattgaataaggcgcatttttcttcaaagctttattgtacgatctgactaagttatcttttaataattggtattcctgtttattgcttgaagaattgccggtcctatttactcgttttaggactggttcagaattcatcgatgctcactcaaaggcggtaatacggttatccacagaatcaggggataacgcaggaaagaacatgtgagcaaaaggccagcaaaaggccaggaaccgtaaaaaggccgcgttgctggcgtttttccataggctccgcccccctgacgagcatcacaaaaatcgacgctcaagtcagaggtggcgaaacccgacaggactataaagataccaggcgtttccccctggaagctccctcgtgcgctctcctgttccgaccctgccgcttaccggatacctgtccgcctttctcccttcgggaagcgtggcgctttctcatagctcacgctgtaggtatctcagttcggtgtaggtcgttcgctccaagctgggctgtgtgcacgaaccccccgttcagcccgaccgctgcgccttatccggtaactatcgtcttgagtccaacccggtaagacacgacttatcgccactggcagcagccactggtaacaggattagcagagcgaggtatgtaggcggtgctacagagttcttgaagtggtggcctaactacggctacactagaagaacagtatttggtatctgcgctctgctgaagccagttaccttcggaaaaagagttggtagctcttgatccggcaaacaaaccaccgctggtagcggtggtttttttgtttgcaagcagcagattacgcgcagaaaaaaaggatctcaagaagatcctttgatcttttctacggggtctgacgctcagtggaacgaaaactcacgttaagggattttggtcatgagattatcaaaaaggatcttcacctagatccttttaaattaaaaatgaagttttaaatcaatctaaagtatatatgagtaaacttggtctgacagttaccaatgcttaatcagtgaggcacctatctcagcgatctgtctatttcgttcatccatagttgcctgactccccgtcgtgtagataactacgatacgggagggcttaccatctggccccagtgctgcaatgataccgcgagacccacgctcaccggctccagatttatcagcaataaaccagccagccggaagggccgagcgcagaagtggtcctgcaactttatccgcctccatccagtctattaattgttgccgggaagctagagtaagtagttcgccagttaatagtttgcgcaacgttgttgccattgctacaggcatcgtggtgtcacgctcgtcgtttggtatggcttcattcagctccggttcccaacgatcaaggcgagttacatgatcccccatgttgtgcaaaaaagcggttagctccttcggtcctccgatcgttgtcagaagtaagttggccgcagtgttatcactcatggttatggcagcactgcataattctcttactgtcatgccatccgtaagatgcttttctgtgactggtgagtactcaaccaagtcattctgagaatagtgtatgcggcgaccgagttgctcttgcccggcgtcaatacgggataataccgcgccacatagcagaactttaaaagtgctcatcattggaaaacgttcttcggggcgaaaactctcaaggatcttaccgctgttgagatccagttcgatgtaacccactcgtgcacccaactgatcttcagcatcttttactttcaccagcgtttctgggtgagcaaaaacaggaaggcaaaatgccgcaaaaaagggaataagggcgacacggaaatgttgaatactcatactcttcctttttcaatattattgaagcatttatcagggttattgtctcatgagcggatacatatttgaatgtatttagaaaaataaacaaataggggttccgcgcacatttccccgaaaagtgccacctgacgtctaagaaaccattattatcatgacattaacctataaaaataggcgtatcacgaggccctttcgtctcgcgcgtttcggtgatgacggtgaaaacctctgacacatgcagctcccggagacggtcacagcttgtctgtaagcggatgccgggagcagacaagcccgtcagggcgcgtcagcgggtgttggcgggtgtcggggctggcttaactatgcggcatcagagcagattgtactgagagtgcaccatatgcggtgtggaataccgcacagatgcgtaaggagaaaataccgcatcaggcgccattcgccattcaggctgcgcaactgttgggaagggcgatcggtgcgggcctcttcgctattacgccagctggcgaaagggggatgtgctgcaaggcgattaagttgggtaacgccagggttttcccagtcacgacgttgtaaaacgacggccagtgaattgcggccgcatcgatggaaaagaccaaacggtgacgttaagagaaagaaattctatgaggcaagtaagaggcactattactgatgtgatttcgaccattgacaaaatgcttcacaaccctgatgaatcggactgggataaatcaacatttggactgtcgcctgttaagatataactgaaaaaagaggggaatttttagatactgaaatgatattttagaataaccagactatatataaggataaattacaaaaaattaactaatagataagatttaaatataaaagatatgcaactagaaaagtcttatcaatctccttattcaaaatgagaaaattgttgtctcaagactcttctcatgatcttatttgtagcagttcttggcaaagatgacaatggaacaactctagtaactttaaacaatgggttcaatttcttttgtaaacccaaattaaaagacaatctcaattggttcaaatcaattgtagtatcatttgaatctttcaaaacaaagaaaataaccaattgttctggaccaccacctaatggtggaacaccaatagctgtagtttcaaaaactctatcatcaacttcgttacaaactctttcgatttcgatagatgagattttaataccaccaatattcattgtatcatcagctctaccatgtgcatggtagtaaccgttagaagtcaattcgaagatgtcaccatgtcttctcaaaacttcaccattcaatgttggcatacccttgaagtaaacatcatgatggttaccgttcaacaaagtctttgaagcaccgaacataactggacctaatgccaattcaccaatacctggcttatttttaggcattgggtaaccgttcttatccaagatgtacaatgtacaacccatacattgagatgaaaaagatgacaaagattgagcttgcaaaaatgaaccagctgaaaatgcaccaccaatttcagtaccaccacacatttcaataactggcttgtagttagctctacccatcaaccacaaatattcatcaacgttagatgcttcaccagatgaagagaaacatctgattgtagaccaatcgtaacctgaaacacagttagtagacttccatgatctaacgattgatggaacaacacccaacattgtaaccttagcatcttgaacgaactttgcgaaaccagaaaccaatggtgaaccgttgtacaaagcgatagatgcaccgttcaacaatgaagcataaaccaaccatggacccatcatccaacccaaattagttggccaaacaataacgtcaccttttctaatatccaaatgtgaccaaccatcagctgcagcttttaatggtgtagcttgagtccatggaattgcttttggttcacctgtagtacctgaagaaaacaagatgtttgtgtaagcatcaactggttgttctcttgcagtgaattcacagtttttgaattccttagctctttccaaaaagtaatcccatgaaatgtcaccatctcttaattctgcaccaatgttagaacctgaacatgggataacgatagccattggagactttgcttcaacaactcttgagtacaatggaattctctttttacctctaatgatatgatcttgtgtaaaaatagcctttgccttagacaatctcaatctagttgagatttctggagcagaaaatgaatctgcaatagaaacaacaacgtaaccagccaaaacgattgccaaatatataacaacagcatcaacatgcattggcatatcaatagcaattgcacaacctttttccaaacccatttcttctaatgcgtaaccaaccaaccaaactctttttctcaattgatccaatgtcaacttattcaatggcaaatcatcgttaccctcatctctccaaacgatcatagtatcgttcaatttcttattagagttaacgttcaaacaatttttagctgaattcaaataaccacctggcaaccattcagaaccacctggattgttgatatcatctcttctcaagatacattctggatctttagaaaatgagatcttcatttcatccatcaaaactgttctccagtaaacttctgggtttctaacagaaaattcttgaaaatgtgaaaatgaagagattggatctttgtacttaacacccaagaattctttacctctcttttccaacaaagcacccaaattagtagacttaaccttttctggatctggaatccaagctggtggtgctggaccgaaatccttgtaacaaccataaaacaacatttgatgcaaagaaaatggcaaatctggtgacaagatatggtttgcgatgttgatccatgtttgtggagttgcagcaccgtagttacaaacgatttcagccaatctaccatgcaatgtttctgcaacttcagaagtaatacccaaagcaatgaaatctgatgcaacaacagaatccaatgacttgtaatttttacccatttatattgaattttcaaaaattcttactttttttttggatggacgcaaagaagtttaataatcatattacatggcattaccaccatatacatatccatatctaatcttacttatatgttgtggaaatgtaaagagccccattatcttagcctaaaaaaaccttctctttggaactttcagtaatacgcttaactgctcattgctatattgaagtacggattagaagccgccgagcgggcgacagccctccgacggaagactctcctccgtgcgtcctcgtcttcaccggtcgcgttcctgaaacgcagatgtgcctcgcgccgcactgctccgaacaataaagattctacaatactagcttttatggttatgaagaggaaaaattggcagtaacctggccccacaaaccttcaaattaacgaatcaaattaacaaccataggatgataatgcgattagttttttagccttatttctggggtaattaatcagcgaagcgatgatttttgatctattaacagatatataaatggaaaagctgcataaccactttaactaatactttcaacattttcagtttgtattacttcttattcaaatgtcataaaagtatcaacaaaaaattgttaatatacctctatactttaacgtcaaggagaaaaaactataatgggtttatctttggtctgtactttttcatttcaaactaattaccatacattgttaaatccacataataagaaccctaaaaattctttgttgtcatatcaacatccaaaaactccaattattaaatcttcttatgataattttccatctaagtactgtttgactaaaaatttccatttgttaggtttaaattctcataatagaatttcttcacaatcaagatcaattagagctggttctgatcaaattgaaggttcaccacatcatgaatctgataactcaatcgcaactaaaattttgaactttggtcatacatgttggaaattgcaaagaccatacgttgttaagggtatgatttctattgcttgtggtttatttggtagagaattgtttaataacagacatttgttttcttggggtttgatgtggaaagcatttttcgcattagttccaatcttgtcttttaatttctttgctgcaatcatgaaccaaatatatgatgttgatattgatagaattaataagccagatttgccattggtttctggtgaaatgtcaatcgaaactgcttggattttatctatcatcgttgcattgactggtttgatcgttacaattaaattaaaatcagctccattgttcgtttttatatatatcttcggtatcttcgctggttttgcatactctgttccaccaattagatggaagcaatacccttttactaatttcttgatcacaatttcttcacatgttggtttggcttttacttcttactcagctactacatctgcattaggtttgccatttgtttggaggccagctttttcttttattatcgcttttatgactgttatgggtatgacaatcgctttcgcaaaggatatctctgatattgaaggtgacgctaaatacggtgtttcaactgttgctacaaaattgggtgcaagaaacatgactttcgttgtttctggtgttttgttgttgaactatttggtttctatctcaatcggtattatttggccacaagtttttaaatctaacatcatgatcttgtcacatgctatcttggcattctgtttgatcttccaaacaagagaattagctttggcaaattatgcttctgcaccatcaagacaatttttcgagtttatttggttgttgtactacgctgaatattttgtttacgtttttatttga

SEQ ID NO: 5 - protein, 385 aa, Cannabis sativa
MNHLRAEGPASVLAIGTANPENILIQDEFPDYYFRVTKSEHMTQLKEKFRKICDKSMIRKRNCFLNEEHLKQNPRLVEHEMQTLDARQDMLVVEVPKLGKDACAKAIKEWGQPKSKITHLIFTSASTTDMPGADYHCAKLLGLSPSVKRVMMYQLGCYGGGTVLRIAKDIAENNKGARVLAVCCDIMACLFRGPSDSDLELLVGQAIFGDGAAAVIVGAEPDESVGERPIFELVSTGQTILPNSEGTIGGHIREAGLIFDLHKDVPMLISNNIEKCLIEAFTPIGISDWNSIFWITHPGGKAILDKVEEKLDLKKEKFVDSRHVLSEHGNMSSSTVLFVMDELRKRSLEEGKSTTGDGFEWGVLFGFGPGLTVERVVVRSVPIKY

SEQ ID NO: 6 - DNA, 1155 bp, Cannabis sativa
atgaatcatttgagagctgaaggtccagcatcagttttggctattggtactgcaaacccagaaaacatcttgatccaagatgaatttccagattattacttcagagttactaagtcagaacatatgacacaattgaaggaaaagtttagaaagatctgtgataagtctatgattagaaaaagaaattgtttcttgaacgaagaacatttgaagcaaaacccaagattagttgaacatgaaatgcaaacattggatgctagacaagatatgttggttgttgaagttccaaagttgggtaaagatgcatgtgctaaagcaattaaagaatggggtcaaccaaagtctaagatcactcatttgatttttacatcagcatctactacagatatgccaggtgctgattaccattgtgcaaagttgttgggtttgtcaccatctgttaagagagttatgatgtaccaattaggttgttacggtggtggtactgttttgagaatcgctaaggatatcgcagaaaacaataagggtgctagagtcttggcagtttgttgtgatatcatggcttgtttgtttagaggtccatcagattctgatttggaattgttagttggtcaagctatttttggtgacggtgctgcagctgttattgttggtgcagaaccagatgaatcagttggtgaaagaccaatcttcgaattagtttcaactggtcaaacaattttgccaaattctgaaggtacaattggtggtcatatcagagaagctggtttgatcttcgatttgcataaagatgttccaatgttgatctctaacaacatcgaaaagtgtttgatcgaagcttttactccaatcggtatctcagattggaactctattttctggattacacatccaggtggtaaagcaatcttggataaggttgaagaaaaattggatttgaagaaagaaaaatttgttgattcaagacatgttttgtctgaacatggtaacatgtcttcatctactgttttgttcgttatggatgaattgagaaagagatcattagaagagggtaaatctactacaggtgacggttttgaatggggtgttttatttggttttggtccaggtttgacagttgaaagagttgttgttagatctgttccaattaaatac

SEQ ID NO: 7 - protein, 104 aa, Cannabis sativa
MAVKHLIVLKFKDEITEAQKEEFFKTYVNLVNIIPAMKDVYWGKDVTQKKEEGYTHIVEVTFESVETIQDYIIHPAHVGFGDVYRSFWEKLLIFDYTPRKLKPK

SEQ ID NO: 8 - DNA, 312 bp, Cannabis sativa
atggctgttaagcatttgatcgttttgaagtttaaagatgaaattacagaagcacaaaaagaagaatttttcaagacttacgttaatttggttaacatcatcccagctatgaaggatgtttattggggtaaagatgttacacaaaagaaagaagaaggttacactcatatcgttgaagttacattcgaatctgttgaaactatccaagattacattattcatccagcacatgttggttttggtgacgtttacagatcattctgggaaaagttgttaatttttgattacactccaagaaaattaaaaccaaaa

SEQ ID NO: 9 - protein, 555 aa, Cannabis sativa
MNCSAFSFWFVCKIIFFFLSFNIQISIANPQENFLKCFSEYIPNNPANPKFIYTQHDQLYMSVLNSTIQNLRFTSDTTPKPLVIVTPSNVSHIQASILCSKKVGLQIRTRSGGHDAEGMSYISQVPFVVVDLRNMHSIKIDVHSQTAWVEAGATLGEVYYWINEKNENFSFPGGYCPTVGVGGHFSGGGYGALMRNYGLAADNIIDAHLVNVDGKVLDRKSMGEDLFWAIRGGGGENFGIIAAWKIKLVAVPSKSTIFSVKKNMEIHGLVKLFNKWQNIAYKYDKDLVLMTHFITKNITDNHGKNKTTVHGYFSSIFHGGVDSLVDLMNKSFPELGIKKTDCKEFSWIDTTIFYSGVVNFNTANFKKEILLDRSAGKKTAFSIKLDYVKKPIPETAMVKILEKLYEEDVGVGMYVLYPYGGIMEEISESAIPFPHRAGIMYELWYTASWEKQEDNEKHINWVRSVYNFTTPYVSQNPRLAYLNYRDLDLGKTNPESPNNYTQARIWGEKYFGKNFNRLVKVKTKADPNNFFRNEQSIPPLPPHHHEQKLISEEDL

SEQ ID NO: 10 - DNA, 1665 bp, Cannabis sativa
atgaactgctccgcattctctttctggttcgtctgtaaaataatcttcttcttcttgtccttcaacatccaaatctccatcgcaaatccacaagaaaactttttgaagtgtttctccgaatacatcccaaacaaccctgctaacccaaagtttatatatactcaacatgatcaattgtacatgtccgttttgaacagtaccatccaaaatttgagattcacttctgacactacaccaaaacctttagtcattgttacaccttccaatgttagtcacattcaagcttctatattgtgctctaagaaagtaggtttgcaaatcagaactagatcaggtggtcatgatgcagaaggcatgtcttacatctcacaagttccattcgttgtagtcgatttgagaaatatgcattccataaagatcgacgttcacagtcaaacagcatgggtagaagcaggtgccaccttgggtgaagtttactactggatcaacgaaaagaatgaaaacttttctttccctggtggttactgtccaacagtaggtgtcggtggtcacttttctggtggtggttatggtgcattgatgagaaactacggtttagctgcagataatattatagacgcccatttggttaacgtagatggtaaagttttggacagaaagtctatgggtgaagatttgttttgggccataagaggtggtggtggtgaaaatttcggtatcattgccgcttggaaaattaagttagtcgctgttccttccaaaagtactattttctctgtcaaaaagaacatggaaatccacggtttggttaagttgtttaataagtggcaaaacatcgcttacaagtacgataaggacttggttttgatgacccatttcatcactaaaaatattacagataaccatggtaaaaataagaccactgttcacggttatttttcttcaattttccatggtggtgtagattctttggttgatttgatgaataagtcattcccagaattgggtattaaaaagacagattgcaaggaattttcttggatagacacaaccatcttctattcaggtgttgtaaacttcaacaccgctaacttcaaaaaggaaatcttgttggatagatccgctggtaaaaagaccgctttttctattaaattggactacgttaagaaaccaatccctgaaactgcaatggtcaagatattggaaaagttgtacgaagaagatgtaggtgtcggcatgtacgttttgtatccatacggtggtattatggaagaaatatctgaatcagccataccatttcctcacagagctggtatcatgtatgaattatggtacacagcctcatgggaaaagcaagaagataacgaaaagcatatcaactgggtcagatccgtttacaacttcactacaccttacgttagtcaaaacccaagattggcatatttgaactacagagatttggacttaggtaaaactaaccctgaatctccaaataactatacacaagcaagaatttggggtgaaaagtactttggtaaaaatttcaacagattagttaaagtaaagactaaagccgaccctaacaactttttcagaaacgaacaatccatcccacctttgccacctcaccaccacgaacaaaaattaataagtgaagaagatttg

SEQ ID NO: 11 - protein, 554 aa, Cannabis sativa
MKCSTFSFWFVCKIIFFFFSFNIQTSIANPRENFLKCFSQYIPNNATNLKLVYTQNNPLYMSVLNSTIHNLRFTSDTTPKPLVIVTPSHVSHIQGTILCSKKVGLQIRTRSGGHDSEGMSYISQVPFVIVDLRNMRSIKIDVHSQTAWVEAGATLGEVYYWVNEKNENLSLAAGYCPTVCAGGHFGGGGYGPLMRNYGLAADNIIDAHLVNVHGKVLDRKSMGEDLFWALRGGGAESFGIIVAWKIRLVAVPKSTMFSVKKIMEIHELVKLVNKWQNIAYKYDKDLLLMTHFITRNITDNQGKNKTAIHTYFSSVFLGGVDSLVDLMNKSFPELGIKKTDCRQLSWIDTIIFYSGVVNYDTDNFNKEILLDRSAGQNGAFKIKLDYVKKPIPESVFVQILEKLYEEDIGAGMYALYPYGGIMDEISESAIPFPHRAGILYELWYICSWEKQEDNEKHLNWIRNIYNFMTPYVSKNPRLAYLNYRDLDIGINDPKNPNNYTQARIWGEKYFGKNFDRLVKVKTLVDPNNFFRNEQSIPPLPRHRHEQKLISEEDL

SEQ ID NO: 12 - DNA, 1662 bp, Cannabis sativa
atgaaatgttcaactttctccttttggttcgtatgcaagatcatcttctttttcttttcctttaacatccaaacaagtatcgcaaacccaagagaaaactttttgaagtgcttctcacaatacatacctaataacgccaccaatttgaagttggtttacactcaaaacaacccattgtacatgtccgtcttgaacagtacaatccataatttgagattcacttctgataccactccaaaacctttggtcattgtaacccctagtcatgtatctcacatccaaggtactatcttatgttctaaaaaggttggtttgcaaattagaactagatccggtggtcatgatagtgaaggcatgtcatacatctcccaagttccattcgttatcgttgatttgagaaacatgagatcaattaaaatagacgtacactcacaaactgcttgggttgaagctggtgcaacattgggtgaagtatactactgggttaacgaaaagaatgaaaacttatcattggctgctggttactgtccaacagtttgcgcaggtggtcattttggtggtggtggttatggtcctttaatgagaaactacggtttggccgctgataacataatcgacgctcatttggtaaatgttcacggtaaagttttggatagaaagtctatgggtgaagacttattttgggctttgagaggtggtggtgcagaatcattcggtatcatagttgcttggaagataagattagtcgcagtaccaaagtctactatgttctcagtcaaaaagataatggaaatccatgaattagttaaattggtcaataagtggcaaaacatcgcatacaagtacgataaggacttgttgttgatgactcatttcatcacaagaaacatcaccgataaccaaggtaaaaataagactgctatccacacatacttttcttcagttttcttgggtggtgtcgattccttagtagacttgatgaataagtcttttccagaattaggtattaagaaaactgattgtagacaattgtcttggatcgacaccatcatcttttattcaggtgttgtcaactacgatacagacaacttcaacaaagaaatattattggatagatccgcaggtcaaaacggtgcctttaaaattaagttagactacgttaaaaagccaatacctgaatcagttttcgtccaaatcttagaaaaattgtacgaagaagatattggtgcaggcatgtacgccttgtatccatacggtggtataatggacgaaatcagtgaatctgccattccatttcctcatagagctggtatcttatacgaattgtggtacatttgttcatgggaaaagcaagaagataacgaaaagcacttaaactggattagaaacatctataacttcatgactccatacgtttctaaaaaccctagattggcatatttgaactacagagatttggacatcggtattaacgatccaaagaatcctaacaactatacccaagctagaatttggggtgaaaaatacttcggtaaaaatttcgatagattagtaaaggttaagacattggttgacccaaacaacttctttagaaacgaacaatccattccacctttacctagacatagacacgaacaaaaattaataagtgaagaagatttg

SEQ ID NO: 13 - protein, 720 aa, Cannabis sativa
MGKNYKSLDSVVASDFIALGITSEVAETLHGRLAEIVCNYGAATPQTWINIANHILSPDLPFSLHQMLFYGCYKDFGPAPPAWIPDPEKVKSTNLGALLEKRGKEFLGVKYKDPISSFSHFQEFSVRNPEVYWRTVLMDEMKISFSKDPECILRRDDINNPGGSEWLPGGYLNSAKNCLNVNSNKKLNDTMIVWRDEGNDDLPLNKLTLDQLRKRVWLVGYALEEMGLEKGCAIAIDMPMHVDAVVIYLAIVLAGYVVVSIADSFSAPEISTRLRLSKAKAIFTQDHIIRGKKRIPLYSRVVEAKSPMAIVIPCSGSNIGAELRDGDISWDYFLERAKEFKNCEFTAREQPVDAYTNILFSSGTTGEPKAIPWTQATPLKAAADGWSHLDIRKGDVIVWPTNLGWMMGPWLVYASLLNGASIALYNGSPLVSGFAKFVQDAKVTMLGVVPSIVRSWKSTNCVSGYDWSTIRCFSSSGEASNVDEYLWLMGRANYKPVIEMCGGTEIGGAFSAGSFLQAQSLSSFSSQCMGCTLYILDKNGYPMPKNKPGIGELALGPVMFGASKTLLNGNHHDVYFKGMPTLNGEVLRRHGDIFELTSNGYYHAHGRADDTMNIGGIKISSIEIERVCNEVDDRVFETTAIGVPPLGGGPEQLVIFFVLKDSNDTTIDLNQLRLSFNLGLQKKLNPLFKVTRVVPLSSLPRTATNKIMRRVLRQQFSHFE

SEQ ID NO: 14 - DNA, 2160 bp, Cannabis sativa
atgggtaaaaattacaagtcattggattctgttgttgcatcagatttcattgctttgggtattacttctgaagttgcagaaacattgcatggtagattggctgaaatcgtttgtaactacggtgctgcaactccacaaacatggatcaacatcgcaaaccatatcttgtcaccagatttgccattttctttgcatcaaatgttgttttatggttgttacaaggatttcggtccagcaccaccagcttggattccagatccagaaaaggttaagtctactaatttgggtgctttgttggaaaagagaggtaaagaattcttgggtgttaagtacaaagatccaatctcttcattttcacattttcaagaattttctgttagaaacccagaagtttactggagaacagttttgatggatgaaatgaagatctcattttctaaagatccagaatgtatcttgagaagagatgatatcaacaatccaggtggttctgaatggttgccaggtggttatttgaattcagctaaaaattgtttgaacgttaactctaataagaaattgaacgatactatgatcgtttggagagatgagggtaacgatgatttgccattgaataagttgacattggatcaattgagaaaaagagtttggttggttggttacgcattagaagaaatgggtttggaaaaaggttgtgcaattgctattgatatgccaatgcatgttgatgctgttgttatatatttggcaatcgttttggctggttacgttgttgtttctattgcagattcattttctgctccagaaatctcaactagattgagattgtctaaggcaaaggctatttttacacaagatcatatcattagaggtaaaaagagaattccattgtactcaagagttgttgaagcaaagtctccaatggctatcgttatcccatgttcaggttctaacattggtgcagaattaagagatggtgacatttcatgggattactttttggaaagagctaaggaattcaaaaactgtgaattcactgcaagagaacaaccagttgatgcttacacaaacatcttgttttcttcaggtactacaggtgaaccaaaagcaattccatggactcaagctacaccattaaaagctgcagctgatggttggtcacatttggatattagaaaaggtgacgttattgtttggccaactaatttgggttggatgatgggtccatggttggtttatgcttcattgttgaacggtgcatctatcgctttgtacaacggttcaccattggtttctggtttcgcaaagttcgttcaagatgctaaggttacaatgttgggtgttgttccatcaatcgttagatcatggaagtctactaactgtgtttcaggttacgattggtctacaatcagatgtttctcttcatctggtgaagcatctaacgttgatgaatatttgtggttgatgggtagagctaactacaagccagttattgaaatgtgtggtggtactgaaattggtggtgcattttcagctggttcatttttgcaagctcaatctttgtcatctttttcatctcaatgtatgggttgtacattgtacatcttggataagaacggttacccaatgcctaaaaataagccaggtattggtgaattggcattaggtccagttatgttcggtgcttcaaagactttgttgaacggtaaccatcatgatgtttacttcaagggtatgccaacattgaatggtgaagttttgagaagacatggtgacatcttcgaattgacttctaacggttactaccatgcacatggtagagctgatgatacaatgaatattggtggtattaaaatctcatctatcgaaatcgaaagagtttgtaacgaagttgatgatagagtttttgaaactacagctattggtgttccaccattaggtggtggtccagaacaattggttattttctttgttttgaaagattcaaatgatactacaattgatttgaaccaattgagattgtcttttaatttgggtttacaaaagaaattgaacccattgtttaaagttactagagttgttccattgtcatctttgccaagaactgctacaaataagatcatgagaagagtcttgagacaacaattttctcattttgaa

SEQ ID NO: 15 - protein, 18 aa, Artificial Sequence
  source: /note="Description of Artificial Sequence: Synthetic peptide"
  source: /note="T2A"
EGRGSLLTCGDVEENPGP

SEQ ID NO: 16 - DNA, 54 bp, Artificial Sequence
  source: /note="Description of Artificial Sequence: Synthetic oligonucleotide"
  source: /note="T2A"
gaaggtagaggttctttgttgacctgtggtgacgttgaagaaaatccaggtcct

SEQ ID NO: 17 - protein, 530 aa, Cannabis sativa
MNCSTFSFWFVCKIIFFFLSFNIQISIANPQENFLKCFSEYIPNNPAPKFIYTQHDQLYMSVLNSTIQNLRFTSDTTPKPLVIVTPSNVSHIQASILCSKVGLQIRTRSGGHDAEGLSYISQVPFAIVDLRNMHTVVDIHSQTAVEAGATLGEVYYWINEMNENFSFPGGYCPTVGVGGHFSGGGYGALMRNYGLAADNIIDAHLVNVDGKVLDRKSMGEDLFWAIRGGGGENFGIIAACIKLWVPSKATIFSVKKNMEIHGLVKLFNKWQNIAYYDKDLMLTTHFRTRNITDNHGNKTTVHGYFSSIFLGGVDSLVDLMNKSFPELGIKTDCKELSWIDTTIFYSGWYNTAFKKEILLDRSAGKKTAFSIKLDYVKKLIPETAMVKILELYEEEVGVGMYVLYPYGGIMDEISESAIPFPHRAGIMYELYTATEKQEDNEKHINWVRSVYNFTTPYVSQNPRLAYLNYRDLDLGKTNPESPNNYTQARIWGEKYFGKNFNRLVKVKTKADPNNFFRNEQSIPPLPPRHH

SEQ ID NO: 18 - DNA, 1635 bp, Cannabis sativa
atgaattgctcaacattctccttttggtttgtttgcaaaataatatttttctttctctcattcaatatccaaatttcaatagctaatcctcaagaaaacttccttaaatgcttctcggaatatattcctaacaatccagcaaatccaaaattcatatacactcaacacgaccaattgtatatgtctgtcctgaattcgacaatacaaaatcttagattcacctctgatacaaccccaaaaccactcgttattgtcactccttcaaatgtctcccatatccaggccagtattctctgctccaagaaagttggtttgcagattcgaactcgaagcggtggccatgatgctgagggtttgtcctacatatctcaagtcccatttgctatagtagacttgagaaacatgcatacggtcaaagtagatattcatagccaaactgcgtgggttgaagccggagctacccttggagaagtttattattggatcaatgagatgaatgagaattttagttttcctggtgggtattgccctactgttggcgtaggtggacactttagtggaggaggctatggagcattgatgcgaaattatggccttgcggctgataatatcattgatgcacacttagtcaatgttgatggaaaagttctagatcgaaaatccatgggagaagatctattttgggctatacgtggtggaggaggagaaaactttggaatcattgcagcatgtaaaatcaaacttgttgttgtcccatcaaaggctactatattcagtgttaaaaagaacatggagatacatgggcttgtcaagttatttaacaaatggcaaaatattgcttacaagtatgacaaagatttaatgctcacgactcacttcagaactaggaatattacagataatcatgggaagaataagactacagtacatggttacttctcttccatttttcttggtggagtggatagtctagttgacttgatgaacaagagctttcctgagttgggtattaaaaaaactgattgcaaagaattgagctggattgatacaaccatcttctacagtggtgttgtaaattacaacactgctaattttaaaaaggaaattttgcttgatagatcagctgggaagaagacggctttctcaattaagttagactatgttaagaaactaatacctgaaactgcaatggtcaaaattttggaaaaattatatgaagaagaggtaggagttgggatgtatgtgttgtacccttacggtggtataatggatgagatttcagaatcagcaattccattccctcatcgagctggaataatgtatgaactttggtacactgctacctgggagaagcaagaagataacgaaaagcatataaactgggttcgaagtgtttataatttcacaactccttatgtgtcccaaaatccaagattggcgtatctcaattatagggaccttgatttaggaaaaactaatcctgagagtcctaataattacacacaagcacgtatttggggtgaaaagtattttggtaaaaattttaacaggttagttaaggtgaaaaccaaagctgatcccaataatttttttagaaacgaacaaagtatcccacctcttccaccgcgtcatcat

SEQ ID NO: 19 - DNA, 3165 bp, Saccharomyces cerevisiae
atgccgccgctattcaagggactgaaacagatggcaaagccaattgcctatgtttcaagattttcggcgaaacgaccaattcatataatacttttttctctaatcatatccgcattcgcttatctatccgtcattcagtattacttcaatggttggcaactagattcaaatagtgtttttgaaactgctccaaataaagactccaacactctatttcaagaatgttcccattactacagagattcctctctagatggttgggtatcaatcaccgcgcatgaagctagtgagttaccagccccacaccattactatctattaaacctgaacttcaatagtcctaatgaaactgactccattccagaactagctaacacggtttttgagaaagataatacaaaatatattctgcaagaagatctcagtgtttccaaagaaatttcttctactgatggaacgaaatggaggttaagaagtgacagaaaaagtcttttcgacgtaaagacgttagcatattctctctacgatgtattttcagaaaatgtaacccaagcagacccgtttgacgtccttattatggttactgcctacctaatgatgttctacaccatattcggcctcttcaatgacatgaggaagaccgggtcaaatttttggttgagcgcctctacagtggtcaattctgcatcatcacttttcttagcattgtatgtcacccaatgtattctaggcaaagaagtttccgcattaactctttttgaaggtttgcctttcattgtagttgttgttggtttcaagcacaaaatcaagattgcccagtatgccctggagaaatttgaaagagtcggtttatctaaaaggattactaccgatgaaatcgtttttgaatccgtgagcgaagagggtggtcgtttgattcaagaccatttgctttgtatttttgcctttatcggatgctctatgtatgctcaccaattgaagactttgacaaacttctgcatattatcagcatttatcctaatttttgaattgattttaactcctacattttattctgctatcttagcgcttagactggaaatgaatgttatccacagatctactattatcaagcaaacattagaagaagacggtgttgttccatctacagcaagaatcatttctaaagcagaaaagaaatccgtatcttctttcttaaatctcagtgtggttgtcattatcatgaaactctctgtcatactgttgtttgtcttcatcaacttttataactttggtgcaaattgggtcaatgatgccttcaattcattgtacttcgataaggaacgtgtttctctaccagattttattacctcgaatgcctctgaaaactttaaagagcaagctattgttagtgtcaccccattattatattacaaacccattaagtcctaccaacgcattgaggatatggttcttctattgcttcgtaatgtcagtgttgccattcgtgataggttcgtcagtaaattagttctttccgccttagtatgcagtgctgtcatcaatgtgtatttattgaatgctgctagaattcataccagttatactgcagaccaattggtgaaaactgaagtcaccaagaagtcttttactgctcctgtacaaaaggcttctacaccagttttaaccaataaaacagtcatttctggatcgaaagtcaaaagtttatcatctgcgcaatcgagctcatcaggaccttcatcatctagtgaggaagatgattcccgcgatattgaaagcttggataagaaaatacgtcctttagaagaattagaagcattattaagtagtggaaatacaaaacaattgaagaacaaagaggtcgctgccttggttattcacggtaagttacctttgtacgctttggagaaaaaattaggtgatactacgagagcggttgcggtacgtaggaaggctctttcaattttggcagaagctcctgtattagcatctgatcgtttaccatataaaaattatgactacgaccgcgtatttggcgcttgttgtgaaaatgttataggttacatgcctttgcccgttggtgttataggccccttggttatcgatggtacatcttatcatataccaatggcaactacagagggttgtttggtagcttctgccatgcgtggctgtaaggcaatcaatgctggcggtggtgcaacaactgttttaactaaggatggtatgacaagaggcccagtagtccgtttcccaactttgaaaagatctggtgcctgtaagatatggttagactcagaagagggacaaaacgcaattaaaaaagcttttaactctacatcaagatttgcacgtctgcaacatattcaaacttgtctagcaggagatttactcttcatgagatttagaacaactactggtgacgcaatgggtatgaatatgatttctaaaggtgtcgaatactcattaaagcaaatggtagaagagtatggctgggaagatatggaggttgtctccgtttctggtaactactgtaccgacaaaaaaccagctgccatcaactggatcgaaggtcgtggtaagagtgtcgtcgcagaagctactattcctggtgatgttgtcagaaaagtgttaaaaagtgatgtttccgcattggttgagttgaacattgctaagaatttggttggatctgcaatggctgggtctgttggtggatttaacgcacatgcagctaatttagtgacagctgttttcttggcattaggacaagatcctgcacaaaatgttgaaagttccaactgtataacattgatgaaagaagtggacggtgatttgagaatttccgtatccatgccatccatcgaagtaggtaccatcggtggtggtactgttctagaaccacaaggtgccatgttggacttattaggtgtaagaggcccgcatgctaccgctcctggtaccaacgcacgtcaattagcaagaatagttgcctgtgccgtcttggcaggtgaattatccttatgtgctgccctagcagccggccatttggttcaaagtcatatgacccacaacaggaaacctgctgaaccaacaaaacctaacaatttggacgccactgatataaatcgtttgaaagatgggtccgtcacctgcattaaatcctaa

SEQ ID NO: 20 - protein, 1054 aa, Saccharomyces cerevisiae
MPPLFKGLKQMAKPIAYVSRFSAKRPIHIILFSLIISAFAYLSVIQYYFNGWQLDSNSVFETAPNKDSNTLFQECSHYYRDSSLDGWVSITAHEASELPAPHHYYLLNLNFNSPNETDSIPELANTVFEKDNTKYILQEDLSVSKEISSTDGTKWRLRSDRKSLFDVKTLAYSLYDVFSENVTQADPFDVLIMVTAYLMMFYTIFGLFNDMRKTGSNFWLSASTVVNSASSLFLALYVTQCILGKEVSALTLFEGLPFIVVVVGFKHKIKIAQYALEKFERVGLSKRITTDEIVFESVSEEGGRLIQDHLLCIFAFIGCSMYAHQLKTLTNFCILSAFILIFELILTPTFYSAILALRLEMNVIHRSTIIKQTLEEDGVVPSTARIISKAEKKSVSSFLNLSVVVIIMKLSVILLFVFINFYNFGANWVNDAFNSLYFDKERVSLPDFITSNASENFKEQAIVSVTPLLYYKPIKSYQRIEDMVLLLLRNVSVAIRDRFVSKLVLSALVCSAVINVYLLNAARIHTSYTADQLVKTEVTKKSFTAPVQKASTPVLTNKTVISGSKVKSLSSAQSSSSGPSSSSEEDDSRDIESLDKKIRPLEELEALLSSGNTKQLKNKEVAALVIHGKLPLYALEKKLGDTTRAVAVRRKALSILAEAPVLASDRLPYKNYDYDRVFGACCENVIGYMPLPVGVIGPLVIDGTSYHIPMATTEGCLVASAMRGCKAINAGGGATTVLTKDGMTRGPVVRFPTLKRSGACKIWLDSEEGQNAIKKAFNSTSRFARLQHIQTCLAGDLLFMRFRTTTGDAMGMNMISKGVEYSLKQMVEEYGWEDMEVVSVSGNYCTDKKPAAINWIEGRGKSVVAEATIPGDVVRKVLKSDVSALVELNIAKNLVGSAMAGSVGGFNAHAANLVTAVFLALGQDPAQNVESSNCITLMKEVDGDLRISVSMPSIEVGTIGGGTVLEPQGAMLDLLGVRGPHATAPGTNARQLARIVACAVLAGELSLCAALAAGHLVQSHMTHNRKPAEPTKPNNLDATDINRLKDGSVTCIKS

SEQ ID NO: 21 - DNA, 1578 bp, Saccharomyces cerevisiae
atggaccaattggtgaaaactgaagtcaccaagaagtcttttactgctcctgtacaaaaggcttctacaccagttttaaccaataaaacagtcatttctggatcgaaagtcaaaagtttatcatctgcgcaatcgagctcatcaggaccttcatcatctagtgaggaagatgattcccgcgatattgaaagcttggataagaaaatacgtcctttagaagaattagaagcattattaagtagtggaaatacaaaacaattgaagaacaaagaggtcgctgccttggttattcacggtaagttacctttgtacgctttggagaaaaaattaggtgatactacgagagcggttgcggtacgtaggaaggctctttcaattttggcagaagctcctgtattagcatctgatcgtttaccatataaaaattatgactacgaccgcgtatttggcgcttgttgtgaaaatgttataggttacatgcctttgcccgttggtgttataggccccttggttatcgatggtacatcttatcatataccaatggcaactacagagggttgtttggtagcttctgccatgcgtggctgtaaggcaatcaatgctggcggtggtgcaacaactgttttaactaaggatggtatgacaagaggcccagtagtccgtttcccaactttgaaaagatctggtgcctgtaagatatggttagactcagaagagggacaaaacgcaattaaaaaagcttttaactctacatcaagatttgcacgtctgcaacatattcaaacttgtctagcaggagatttactcttcatgagatttagaacaactactggtgacgcaatgggtatgaatatgatttctaaaggtgtcgaatactcattaaagcaaatggtagaagagtatggctgggaagatatggaggttgtctccgtttctggtaactactgtaccgacaaaaaaccagctgccatcaactggatcgaaggtcgtggtaagagtgtcgtcgcagaagctactattcctggtgatgttgtcagaaaagtgttaaaaagtgatgtttccgcattggttgagttgaacattgctaagaatttggttggatctgcaatggctgggtctgttggtggatttaacgcacatgcagctaatttagtgacagctgttttcttggcattaggacaagatcctgcacaaaatgttgaaagttccaactgtataacattgatgaaagaagtggacggtgatttgagaatttccgtatccatgccatccatcgaagtaggtaccatcggtggtggtactgttctagaaccacaaggtgccatgttggacttattaggtgtaagaggcccgcatgctaccgctcctggtaccaacgcacgtcaattagcaagaatagttgcctgtgccgtcttggcaggtgaattatccttatgtgctgccctagcagccggccatttggttcaaagtcatatgacccacaacaggaaacctgctgaaccaacaaaacctaacaatttggacgccactgatataaatcgtttgaaagatgggtccgtcacctgcattaaatcctaa

SEQ ID NO: 22 - protein, 525 aa, Saccharomyces cerevisiae
MDQLVKTEVTKKSFTAPVQKASTPVLTNKTVISGSKVKSLSSAQSSSSGPSSSSEEDDSRDIESLDKKIRPLEELEALLSSGNTKQLKNKEVAALVIHGKLPLYALEKKLGDTTRAVAVRRKALSILAEAPVLASDRLPYKNYDYDRVFGACCENVIGYMPLPVGVIGPLVIDGTSYHIPMATTEGCLVASAMRGCKAINAGGGATTVLTKDGMTRGPVVRFPTLKRSGACKIWLDSEEGQNAIKKAFNSTSRFARLQHIQTCLAGDLLFMRFRTTTGDAMGMNMISKGVEYSLKQMVEEYGWEDMEVVSVSGNYCTDKKPAAINWIEGRGKSVVAEATIPGDVVRKVLKSDVSALVELNIAKNLVGSAMAGSVGGFNAHAANLVTAVFLALGQDPAQNVESSNCITLMKEVDGDLRISVSMPSIEVGTIGGGTVLEPQGAMLDLLGVRGPHATAPGTNARQLARIVACAVLAGELSLCAALAAGHLVQSHMTHNRKPAEPTKPNNLDATDINRLKDGSVTCIKS

SEQ ID NO: 23 - DNA, 1059 bp, Saccharomyces cerevisiae
atggcttcagaaaaagaaattaggagagagagattcttgaacgttttccctaaattagtagaggaattgaacgcatcgcttttggcttacggtatgcctaaggaagcatgtgactggtatgcccactcattgaactacaacactccaggcggtaagctaaatagaggtttgtccgttgtggacacgtatgctattctctccaacaagaccgttgaacaattggggcaagaagaatacgaaaaggttgccattctaggttggtgcattgagttgttgcaggcttacttcttggtcgccgatgatatgatggacaagtccattaccagaagaggccaaccatgttggtacaaggttcctgaagttggggaaattgccatcaatgacgcattcatgttagaggctgctatctacaagcttttgaaatctcacttcagaaacgaaaaatactacatagatatcaccgaattgttccatgaggtcaccttccaaaccgaattgggccaattgatggacttaatcactgcacctgaagacaaagtcgacttgagtaagttctccctaaagaagcactccttcatagttactttcaagactgcttactattctttctacttgcctgtcgcattggccatgtacgttgccggtatcacggatgaaaaggatttgaaacaagccagagatgtcttgattccattgggtgaatacttccaaattcaagatgactacttagactgcttcggtaccccagaacagatcggtaagatcggtacagatatccaagataacaaatgttcttgggtaatcaacaaggcattggaacttgcttccgcagaacaaagaaagactttagacgaaaattacggtaagaaggactcagtcgcagaagccaaatgcaaaaagattttcaatgacttgaaaattgaacagctataccacgaatatgaagagtctattgccaaggatttgaaggccaaaatttctcaggtcgatgagtctcgtggcttcaaagctgatgtcttaactgcgttcttgaacaaagtttacaagagaagcaaatag

SEQ ID NO: 24 - protein, 352 aa, Saccharomyces cerevisiae
MASEKEIRRERFLNVFPKLVEELNASLLAYGMPKEACDWYAHSLNYNTPGGKLNRGLSVVDTYAILSNKTVEQLGQEEYEKVAILGWCIELLQAYFLVADDMMDKSITRRGQPCWYKVPEVGEIAINDAFMLEAAIYKLLKSHFRNEKYYIDITELFHEVTFQTELGQLMDLITAPEDKVDLSKFSLKKHSFIVTFKTAYYSFYLPVALAMYVAGITDEKDLKQARDVLIPLGEYFQIQDDYLDCFGTPEQIGKIGTDIQDNKCSWVINKALELASAEQRKTLDENYGKKDSVAEAKCKKIFNDLKIEQLYHEYEESIAKDLKAKISQVDESRGFKADVLTAFLNKVYKRSK

SEQ ID NO: 25 - DNA, 9186 bp, Artificial Sequence
  source: /note="Description of Artificial Sequence: Synthetic polynucleotide"
  source: /note="bCBGA0306 vector"
ttatattgaattttcaaaaattcttactttttttttggatggacgcaaagaagtttaataatcatattacatggcattaccaccatatacatatccatatctaatcttacttatatgttgtggaaatgtaaagagccccattatcttagcctaaaaaaaccttctctttggaactttcagtaatacgcttaactgctcattgctatattgaagtacggattagaagccgccgagcgggcgacagccctccgacggaagactctcctccgtgcgtcctcgtcttcaccggtcgcgttcctgaaacgcagatgtgcctcgcgccgcactgctccgaacaataaagattctacaatactagcttttatggttatgaagaggaaaaattggcagtaacctggccccacaaaccttcaaattaacgaatcaaattaacaaccataggatgataatgcgattagttttttagccttatttctggggtaattaatcagcgaagcgatgatttttgatctattaacagatatataaatggaaaagctgcataaccactttaactaatactttcaacattttcagtttgtattacttcttattcaaatgtcataaaagtatcaacaaaaaattgttaatatacctctatactttaacgtcaaggagaaaaaactataatgggtttatctttggtctgtactttttcatttcaaactaattaccatacattgttaaatccacataataagaaccctaaaaattctttgttgtcatatcaacatccaaaaactccaattattaaatcttcttatgataattttccatctaagtactgtttgactaaaaatttccatttgttaggtttaaattctcataatagaatttcttcacaatcaagatcaattagagctggttctgatcaaattgaaggttcaccacatcatgaatctgataactcaatcgcaactaaaattttgaactttggtcatacatgttggaaattgcaaagaccatacgttgttaagggtatgatttctattgcttgtggtttatttggtagagaattgtttaataacagacatttgttttcttggggtttgatgtggaaagcatttttcgcattagttccaatcttgtcttttaatttctttgctgcaatcatgaaccaaatatatgatgttgatattgatagaattaataagccagatttgccattggtttctggtgaaatgtcaatcgaaactgcttggattttatctatcatcgttgcattgactggtttgatcgttacaattaaattaaaatcagctccattgttcgtttttatatatatcttcggtatcttcgctggttttgcatactctgttccaccaattagatggaagcaatacccttttactaatttcttgatcacaatttcttcacatgttggtttggcttttacttcttactcagctactacatctgcattaggtttgccatttgtttggaggccagctttttcttttattatcgcttttatgactgttatgggtatgacaatcgctttcgcaaaggatatctctgatattgaaggtgacgctaaatacggtgtttcaactgttgctacaaaattgggtgcaagaaacatgactttcgttgtttctggtgttttgttgttgaactatttggtttctatctcaatcggtattatttggccacaagtttttaaatctaacatcatgatcttgtcacatgctatcttggcattctgtttgatcttccaaacaagagaattagctttggcaaattatgcttctgcaccatcaagacaatttttcgagtttatttggttgttgtactacgctgaatattttgtttacgtttttatttgagattaatataattatataaaaatattatcttcttttctttatatctagtgttatgtaaaataaattgatgactacggaaagcttttttatattgtttctttttcattctgagccacttaaatttcgtgaatgttcttgtaagggacggtagatttacaagtgatacaacaaaaagcaaggcgctttttctaataaaaagaagaaaagcatttaacaattgaacacctctatatcaacgaagaatattactttgtctctaaatccttgtaaaatgtgtacgatctctatatgggttactcataagtgtaccgaagactgcattgaaagtttatgttttttcactggaggcgtcattttcgcgttgagaacaattgtcctgtacttccttgttcatgtgtgttcaaaaacgttatatttataggataattatactctatttctcaacaagtaattggttgtttggccgagcggtctaaggcgcctgattcaagaaatatcttgaccgcagttaactgtgggaatactcaggtatcgtaagatgcaagagttcgaatctcttagcaaccattatttttttcctcaacataacgagaacacacaggggcgctatcgcacagaatcaaattcgatgactggaaattttttgttaatttcagaggtcgcctgacgcatatacctttttcaactgaaaaattgggagaaaaaggaaaggtgagagcgccggaaccggcttttcatatagaatagagaagcgttcatgactaaatgcttgcatcacaatacttgaagttgacaatattatttaaggacctattgttttttccaataggtggttagcaatcgtcttactttctaacttttcttaccttttacatttcagcaatatatatatatatttcaaggatataccattctaatgtctgcccctaagaagatcgtcgttttgccaggtgaccacgttggtcaagaaatcacagccgaagccattaaggttcttaaagctatttctgatgttcgttccaatgtcaagttcgatttcgaaaatcatttaattggtggtgctgctatcgatgctacaggtgttccacttccagatgaggcgctggaagcctccaagaaggctgatgccgttttgttaggtgctgtgggtggtcctaaatggggtaccggtagtgttagacctgaacaaggtttactaaaaatccgtaaagaacttcaattgtacgccaacttaagaccatgtaactttgcatccgactctcttttagacttatctccaatcaagccacaatttgctaaaaatactgacttcgttgttgtcagagaattagtgggaggtatttactttggtaagagaaaggaagacgatggtgatggtgtcgcttgggatagtgaacaatacaccgttccagaagtgcaaagaatcacaagaatggccgctttcatggccctacaacatgagccaccattgcctatttggtccttggataaagctaatgttttggcctcttcaagattatggagaaaaactgtggaggaaaccatcaagaacgaattccctacattgaaggttcaacatcaattgattgattctgccgccatgatcctagttaagaacccaacccacctaaatggtattataatcaccagcaacatgtttggtgatatcatctccgatgaagcctccgttatcccaggttccttgggtttgttgccatctgcgtccttggcctctttgccagacaagaacaccgcatttggtttgtacgaaccatgccacggttctgctccagatttgccaaagaataaggtcaaccctatcgccactatcttgtctgctgcaatgatgttgaaattgtcattgaacttgcctgaagaaggtaaggccattgaagatgcagttaaaaaggttttggatgcaggtatcagaactggtgatttaggtggttccaacagtaccaccgaagtcggtgatgctgtcgccgaagaagttaagaaaatccttgcttaaaaagattctctttttttatgatatttgtacataaactttataaatgaaattcataatagaaacgacacgaaattacaaaatggaatatgttcatagggtagacgaaactatatacgcaatctacatacatttatcaagaaggagaaaaaggaggatgtaaaggaatacaggtaagcaaattgatactaatggctcaacgtgataaggaaaaagaattgcactttaacattaatattgacaaggaggagggcaccacacaaaaagttacagatctgctgcattaatgaatcggccaacgcgcggggagaggcggtttgcgtattgggcgctcttccgcttcctcgctcactgactcgctgcgctcggtcgttcggctgcggcgagcggtatcagcatcgatgaattccacggactatagactatactagtatactccgtctactgtacgatacacttccgctcaggtccttgtcctttaacgaggccttaccactcttttgttactctattgatccagctcagcaaaggcagtgtgatctaagattctatcttcgcgatgtagtaaaactagctagaccgagaaagagactagaaatgcaaaaggcacttctacaatggctgccatcattattatccgatgtgacgctgcagcttctcaatgatattcgaatacgctttgaggagatacagcctaatatccgacaaactgttttacagatttacgatcgtatttgttacccatcattgaattttgaacatccgaacctgggagttttccctgaaacagatagtatatttgaacctgtataataatatatagtctagcgctttacggaagacaatgtatgtatttcggttcctggagaaactattgcatctattgcataggtaatcttgcacgtcgcatccccggttcattttctgcgtttccatcttgcacttcaatagcatatctttgttaacgaagcatctgtgcttcattttgtagaacaaaaatgcaacgcgagagcgctaatttttcaaacaaagaatctgagctgcatttttacagaacagaaatgcaacgcgaaagcgctattttaccaacgaagaatctgtgcttcatttttgtaaaacaaaaatgcaacgcgagagcgctaatttttcaaacaaagaatctgagctgcatttttacagaacagaaatgcaacgcgagagcgctattttaccaacaaagaatctatacttcttttttgttctacaaaaatgcatcccgagagcgctatttttctaacaaagcatcttagattactttttttctcctttgtgcgctctataatgcagtctcttgataactttttgcactgtaggtccgttaaggttagaagaaggctactttggtgtctattttctcttccataaaaaaagcctgactccacttcccgcgtttactgattactagcgaagctgcgggtgcattttttcaagataaaggcatccccgattatattctataccgatgtggattgcgcatactttgtgaacagaaagtgatagcgttgatgattcttcattggtcagaaaattatgaacggtttcttctattttgtctctatatactacgtataggaaatgtttacattttcgtattgttttcgattcactctatgaatagttcttactacaatttttttgtctaaagagtaatactagagataaacataaaaaatgtagaggtcgagtttagatgcaagttcaaggagcgaaaggtggatgggtaggttatatagggatatagcacagagatatatagcaaagagatacttttgagcaatgtttgtggaagcggtattcgcaatattttagtagctcgttacagtccggtgcgtttttggttttttgaaagtgcgtcttcagagcgcttttggttttcaaaagcgctctgaagttcctatactttctagagaataggaacttcggaataggaacttcaaagcgtttccgaaaacgagcgcttccgaaaatgcaacgcgagctgcgcacatacagctcactgttcacgtcgcacctatatctgcgtgttgcctgtatatatatatacatgagaagaacggcatagtgcgtgtttatgcttaaatgcgtacttatatgcgtctatttatgtaggatgaaaggtagtctagtacctcctgtgatattatcccattccatgcggggtatcgtatgcttccttcagcactaccctttagctgttctatatgctgccactcctcaattggattagtctcatccttcaatgctatcatttcctttgatattggatcatatgcatagtaccgagaaactagtgcgaagtagtgatcaggtattgctgttatctgatgagtatacgttgtcctggccacggcagaagcacgcttatcgctccaatttcccacaacattagtcaactccgttaggcccttcattgaaagaaatgaggtcatcaaatgtcttccaatgtgagattttgggccattttttatagcaaagattgaataaggcgcatttttcttcaaagctttattgtacgatctgactaagttatcttttaataattggtattcctgtttattgcttgaagaattgccggtcctatttactcgttttaggactggttcagaattcatcgatgctcactcaaaggcggtaatacggttatccacagaatcaggggataacgcaggaaagaacatgtgagcaaaaggccagcaaaaggccaggaaccgtaaaaaggccgcgttgctggcgtttttccataggctccgcccccctgacgagcatcacaaaaatcgacgctcaagtcagaggtggcgaaacccgacaggactataaagataccaggcgtttccccctggaagctccctcgtgcgctctcctgttccgaccctgccgcttaccggatacctgtccgcctttctcccttcgggaagcgtggcgctttctcatagctcacgctgtaggtatctcagttcggtgtaggtcgttcgctccaagctgggctgtgtgcacgaaccccccgttcagcccgaccgctgcgccttatccggtaactatcgtcttgagtccaacccggtaagacacgacttatcgccactggcagcagccactggtaacaggattagcagagcgaggtatgtaggcggtgctacagagttcttgaagtggtggcctaactacggctacactagaagaacagtatttggtatctgcgctctgctgaagccagttaccttcggaaaaagagttggtagctcttgatccggcaaacaaaccaccgctggtagcggtggtttttttgtttgcaagcagcagattacgcgcagaaaaaaaggatctcaagaagatcctttgatcttttctacggggtctgacgctcagtggaacgaaaactcacgttaagggattttggtcatgagattatcaaaaaggatcttcacctagatccttttaaattaaaaatgaagttttaaatcaatctaaagtatatatgagtaaacttggtctgacagttaccaatgcttaatcagtgaggcacctatctcagcgatctgtctatttcgttcatccatagttgcctgactccccgtcgtgtagataactacgatacgggagggcttaccatctggccccagtgctgcaatgataccgcgagacccacgctcaccggctccagatttatcagcaataaaccagccagccggaagggccgagcgcagaagtggtcctgcaactttatccgcctccatccagtctattaattgttgccgggaagctagagtaagtagttcgccagttaatagtttgcgcaacgttgttgccattgctacaggcatcgtggtgtcacgctcgtcgtttggtatggcttcattcagctccggttcccaacgatcaaggcgagttacatgatcccccatgttgtgcaaaaaagcggttagctccttcggtcctccgatcgttgtcagaagtaagttggccgcagtgttatcactcatggttatggcagcactgcataattctcttactgtcatgccatccgtaagatgcttttctgtgactggtgagtactcaaccaagtcattctgagaatagtgtatgcggcgaccgagttgctcttgcccggcgtcaatacgggataataccgcgccacatagcagaactttaaaagtgctcatcattggaaaacgttcttcggggcgaaaactctcaaggatcttaccgctgttgagatccagttcgatgtaacccactcgtgcacccaactgatcttcagcatcttttactttcaccagcgtttctgggtgagcaaaaacaggaaggcaaaatgccgcaaaaaagggaataagggcgacacggaaatgttgaatactcatactcttcctttttcaatattattgaagcatttatcagggttattgtctcatgagcggatacatatttgaatgtatttagaaaaataaacaaataggggttccgcgcacatttccccgaaaagtgccacctgacgtctaagaaaccattattatcatgacattaacctataaaaataggcgtatcacgaggccctttcgtctcgcgcgtttcggtgatgacggtgaaaacctctgacacatgcagctcccggagacggtcacagcttgtctgtaagcggatgccgggagcagacaagcccgtcagggcgcgtcagcgggtgttggcgggtgtcggggctggcttaactatgcggcatcagagcagattgtactgagagtgcaccatatgcggtgtggaataccgcacagatgcgtaaggagaaaataccgcatcaggcgccattcgccattcaggctgcgcaactgttgggaagggcgatcggtgcgggcctcttcgctattacgccagctggcgaaagggggatgtgctgcaaggcgattaagttgggtaacgccagggttttcccagtcacgacgttgtaaaacgacggccagtgaattgcggccgcatcgatggaaaagaccaaacggtgacgttaagagaaagaaattctatgaggcaagtaagaggcactattactgatgtgatttcgaccattgacaaaatgcttcacaaccctgatgaatcggactgggataaatcaacatttggactgtcgcctgttaagatataactgaaaaaagaggggaatttttagatactgaaatgatattttagaataaccagactatatataaggataaattacaaaaaattaactaatagataagatttaaatataaaagatatgcaactagaaaagtcttatcaatctcctta

SEQ ID NO: 26 - DNA, 1665 bp, Artificial Sequence
  source: /note="Description of Artificial Sequence: Synthetic polynucleotide"
  source: /note="prenyl transferase"
atgtctaaaggtgaagaattattcactggtgttgtcccaattttggttgaattagatggtgatgttaatggtcacaaattttctgtctccggtgaaggtgaaggtgatgctacttacggtaaattgaccttaaaattgatttgtactactggtaaattgccagttccatggccaaccttagtcactactttaggttatggtttgcaatgttttgctagatacccagatcatatgaaacaacatgactttttcaagtctgccatgccagaaggttatgttcaagaaagaactatttttttcaaagatgacggtaactacaagaccagagctgaagtcaagtttgaaggtgataccttagttaatagaatcgaattaaaaggtattgattttaaagaagatggtaacattttaggtcacaaattggaatacaactataactctcacaatgtttacatcactgctgacaaacaaaagaatggtatcaaagctaacttcaaaattagacacaacattgaagatggtggtgttcaattagctgaccattatcaacaaaatactccaattggtgatggtccagtcttgttaccagacaaccattacttatcctatcaatctgccttatccaaagatccaaacgaaaagagagaccacatggtcttgttagaatttgttactgctgctggtattacccatggtatggatgaattgtacaaaattgaaggttcaccacatcatgaatctgataactcaatcgcaactaaaattttgaactttggtcatacatgttggaaattgcaaagaccatacgttgttaagggtatgatttctattgcttgtggtttatttggtagagaattgtttaataacagacatttgttttcttggggtttgatgtggaaagcatttttcgcattagttccaatcttgtcttttaatttctttgctgcaatcatgaaccaaatatatgatgttgatattgatagaattaataagccagatttgccattggtttctggtgaaatgtcaatcgaaactgcttggattttatctatcatcgttgcattgactggtttgatcgttacaattaaattaaaatcagctccattgttcgtttttatatatatcttcggtatcttcgctggttttgcatactctgttccaccaattagatggaagcaatacccttttactaatttcttgatcacaatttcttcacatgttggtttggcttttacttcttactcagctactacatctgcattaggtttgccatttgtttggaggccagctttttcttttattatcgcttttatgactgttatgggtatgacaatcgctttcgcaaaggatatctctgatattgaaggtgacgctaaatacggtgtttcaactgttgctacaaaattgggtgcaagaaacatgactttcgttgtttctggtgttttgttgttgaactatttggtttctatctcaatcggtattatttggccacaagtttttaaatctaacatcatgatcttgtcacatgctatcttggcattctgtttgatcttccaaacaagagaattagctttggcaaattatgcttctgcaccatcaagacaatttttcgagtttatttggttgttgtactacgctgaatattttgtttacgtttttatttga

SEQ ID NO: 27 - protein, 554 aa, Artificial Sequence
  source: /note="Description of Artificial Sequence: Synthetic polypeptide"
  source: /note="prenyl transferase"
MSKGEELFTGVVPILVELDGDVNGHKFSVSGEGEGDATYGKLTLKLICTTGKLPVPWPTLVTTLGYGLQCFARYPDHMKQHDFFKSAMPEGYVQERTIFFKDDGNYKTRAEVKFEGDTLVNRIELKGIDFKEDGNILGHKLEYNYNSHNVYITADKQKNGIKANFKIRHNIEDGGVQLADHYQQNTPIGDGPVLLPDNHYLSYQSALSKDPNEKRDHMVLLEFVTAAGITHGMDELYKIEGSPHHESDNSIATKILNFGHTCWKLQRPYVVKGMISIACGLFGRELFNNRHLFSWGLMWKAFFALVPILSFNFFAAIMNQIYDVDIDRINKPDLPLVSGEMSIETAWILSIIVALTGLIVTIKLKSAPLFVFIYIFGIFAGFAYSVPPIRWKQYPFTNFLITISSHVGLAFTSYSATTSALGLPFVWRPAFSFIIAFMTVMGMTIAFAKDISDIEGDAKYGVSTVATKLGARNMTFVVSGVLLLNYLVSISIGIIWPQVFKSNIMILSHAILAFCLIFQTRELALANYASAPSRQFFEFIWLLYYAEYFVYVFI

SEQ ID NO: 28 - DNA, 717 bp, Artificial Sequence
  source: /note="Description of Artificial Sequence: Synthetic polynucleotide"
  source: /note="modified fluorescent protein yEVenus"
atgtctaaaggtgaagaattattcactggtgttgtcccaattttggttgaattagatggtgatgttaatggtcacaaattttctgtctccggtgaaggtgaaggtgatgctacttacggtaaattgaccttaaaattgatttgtactactggtaaattgccagttccatggccaaccttagtcactactttaggttatggtttgcaatgttttgctagatacccagatcatatgaaacaacatgactttttcaagtctgccatgccagaaggttatgttcaagaaagaactatttttttcaaagatgacggtaactacaagaccagagctgaagtcaagtttgaaggtgataccttagttaatagaatcgaattaaaaggtattgattttaaagaagatggtaacattttaggtcacaaattggaatacaactataactctcacaatgtttacatcactgctgacaaacaaaagaatggtatcaaagctaacttcaaaattagacacaacattgaagatggtggtgttcaattagctgaccattatcaacaaaatactccaattggtgatggtccagtcttgttaccagacaaccattacttatcctatcaatctgccttatccaaagatccaaacgaaaagagagaccacatggtcttgttagaatttgttactgctgctggtattacccatggtatggatgaattgtacaaataa

SEQ ID NO: 29 - DNA, 9654 bp, Artificial Sequence
  source: /note="Description of Artificial Sequence: Synthetic polynucleotide"
  source: /note="bCBGA0385 vector"
ttttctacggggtctgacgctcagtggaacgaaaactcacgttaagggattttggtcatgagattatcaaaaaggatcttcacctagatccttttaaattaaaaatgaagttttaaatcaatctaaagtatatatgagtaaacttggtctgacagttaccaatgcttaatcagtgaggcacctatctcagcgatctgtctatttcgttcatccatagttgcctgactccccgtcgtgtagataactacgatacgggagggcttaccatctggccccagtgctgcaatgataccgcgagacccacgctcaccggctccagatttatcagcaataaaccagccagccggaagggccgagcgcagaagtggtcctgcaactttatccgcctccatccagtctattaattgttgccgggaagctagagtaagtagttcgccagttaatagtttgcgcaacgttgttgccattgctacaggcatcgtggtgtcacgctcgtcgtttggtatggcttcattcagctccggttcccaacgatcaaggcgagttacatgatcccccatgttgtgcaaaaaagcggttagctccttcggtcctccgatcgttgtcagaagtaagttggccgcagtgttatcactcatggttatggcagcactgcataattctcttactgtcatgccatccgtaagatgcttttctgtgactggtgagtactcaaccaagtcattctgagaatagtgtatgcggcgaccgagttgctcttgcccggcgtcaatacgggataataccgcgccacatagcagaactttaaaagtgctcatcattggaaaacgttcttcggggcgaaaactctcaaggatcttaccgctgttgagatccagttcgatgtaacccactcgtgcacccaactgatcttcagcatcttttactttcaccagcgtttctgggtgagcaaaaacaggaaggcaaaatgccgcaaaaaagggaataagggcgacacggaaatgttgaatactcatactcttcctttttcaatattattgaagcatttatcagggttattgtctcatgagcggatacatatttgaatgtatttagaaaaataaacaaataggggttccgcgcacatttccccgaaaagtgccacctgacgtctaagaaaccattattatcatgacattaacctataaaaataggcgtatcacgaggccctttcgtctcgcgcgtttcggtgatgacggtgaaaacctctgacacatgcagctcccggagacggtcacagcttgtctgtaagcggatgccgggagcagacaagcccgtcagggcgcgtcagcgggtgttggcgggtgtcggggctggcttaactatgcggcatcagagcagattgtactgagagtgcaccatatgcggtgtggaataccgcacagatgcgtaaggagaaaataccgcatcaggcgccattcgccattcaggctgcgcaactgttgggaagggcgatcggtgcgggcctcttcgctattacgccagctggcgaaagggggatgtgctgcaaggcgattaagttgggtaacgccagggttttcccagtcacgacgttgtaaaacgacggccagtgaattgcggccgcatcgatggaaaagaccaaacggtgacgttaagagaaagaaattctatgaggcaagtaagaggcactattactgatgtgatttcgaccattgacaaaatgcttcacaaccctgatgaatcggactgggataaatcaacatttggactgtcgcctgttaagatataactgaaaaaagaggggaatttttagatactgaaatgatattttagaataaccagactatatataaggataaattacaaaaaattaactaatagataagatttaaatataaaagatatgcaactagaaaagtcttatcaatctccttattatattgaattttcaaaaattcttactttttttttggatggacgcaaagaagtttaataatcatattacatggcattaccaccatatacatatccatatctaatcttacttatatgttgtggaaatgtaaagagccccattatcttagcctaaaaaaaccttctctttggaactttcagtaatacgcttaactgctcattgctatattgaagtacggattagaagccgccgagcgggcgacagccctccgacggaagactctcctccgtgcgtcctcgtcttcaccggtcgcgttcctgaaacgcagatgtgcctcgcgccgcactgctccgaacaataaagattctacaatactagcttttatggttatgaagaggaaaaattggcagtaacctggccccacaaaccttcaaattaacgaatcaaattaacaaccataggatgataatgcgattagttttttagccttatttctggggtaattaatcagcgaagcgatgatttttgatctattaacagatatataaatggaaaagctgcataaccactttaactaatactttcaacattttcagtttgtattacttcttattcaaatgtcataaaagtatcaacaaaaaattgttaatatacctctatactttaacgtcaaggagaaaaaactataatgtctaaaggtgaagaattattcactggtgttgtcccaattttggttgaattagatggtgatgttaatggtcacaaattttctgtctccggtgaaggtgaaggtgatgctacttacggtaaattgaccttaaaattgatttgtactactggtaaattgccagttccatggccaaccttagtcactactttaggttatggtttgcaatgttttgctagatacccagatcatatgaaacaacatgactttttcaagtctgccatgccagaaggttatgttcaagaaagaactatttttttcaaagatgacggtaactacaagaccagagctgaagtcaagtttgaaggtgataccttagttaatagaatcgaattaaaaggtattgattttaaagaagatggtaacattttaggtcacaaattggaatacaactataactctcacaatgtttacatcactgctgacaaacaaaagaatggtatcaaagctaacttcaaaattagacacaacattgaagatggtggtgttcaattagctgaccattatcaacaaaatactccaattggtgatggtccagtcttgttaccagacaaccattacttatcctatcaatctgccttatccaaagatccaaacgaaaagagagaccacatggtcttgttagaatttgttactgctgctggtattacccatggtatggatgaattgtacaaaattgaaggttcaccacatcatgaatctgataactcaatcgcaactaaaattttgaactttggtcatacatgttggaaattgcaaagaccatacgttgttaagggtatgatttctattgcttgtggtttatttggtagagaattgtttaataacagacatttgttttcttggggtttgatgtggaaagcatttttcgcattagttccaatcttgtcttttaatttctttgctgcaatcatgaaccaaatatatgatgttgatattgatagaattaataagccagatttgccattggtttctggtgaaatgtcaatcgaaactgcttggattttatctatcatcgttgcattgactggtttgatcgttacaattaaattaaaatcagctccattgttcgtttttatatatatcttcggtatcttcgctggttttgcatactctgttccaccaattagatggaagcaatacccttttactaatttcttgatcacaatttcttcacatgttggtttggcttttacttcttactcagctactacatctgcattaggtttgccatttgtttggaggccagctttttcttttattatcgcttttatgactgttatgggtatgacaatcgctttcgcaaaggatatctctgatattgaaggtgacgctaaatacggtgtttcaactgttgctacaaaattgggtgcaagaaacatgactttcgttgtttctggtgttttgttgttgaactatttggtttctatctcaatcggtattatttggccacaagtttttaaatctaacatcatgatcttgtcacatgctatcttggcattctgtttgatcttccaaacaagagaattagctttggcaaattatgcttctgcaccatcaagacaatttttcgagtttatttggttgttgtactacgctgaatattttgtttacgtttttatttgagattaatataattatataaaaatattatcttcttttctttatatctagtgttatgtaaaataaattgatgactacggaaagcttttttatattgtttctttttcattctgagccacttaaatttcgtgaatgttcttgtaagggacggtagatttacaagtgatacaacaaaaagcaaggcgctttttctaataaaaagaagaaaagcatttaacaattgaacacctctatatcaacgaagaatattactttgtctctaaatccttgtaaaatgtgtacgatctctatatgggttactcataagtgtaccgaagactgcattgaaagtttatgttttttcactggaggcgtcattttcgcgttgagaacaattgtcctgtacttccttgttcatgtgtgttcaaaaacgttatatttataggataattatactctatttctcaacaagtaattggttgtttggccgagcggtctaaggcgcctgattcaagaaatatcttgaccgcagttaactgtgggaatactcaggtatcgtaagatgcaagagttcgaatctcttagcaaccattatttttttcctcaacataacgagaacacacaggggcgctatcgcacagaatcaaattcgatgactggaaattttttgttaatttcagaggtcgcctgacgcatatacctttttcaactgaaaaattgggagaaaaaggaaaggtgagagcgccggaaccggcttttcatatagaatagagaagcgttcatgactaaatgcttgcatcacaatacttgaagttgacaatattatttaaggacctattgttttttccaataggtggttagcaatcgtcttactttctaacttttcttaccttttacatttcagcaatatatatatatatttcaaggatataccattctaatgtctgcccctaagaagatcgtcgttttgccaggtgaccacgttggtcaagaaatcacagccgaagccattaaggttcttaaagctatttctgatgttcgttccaatgtcaagttcgatttcgaaaatcatttaattggtggtgctgctatcgatgctacaggtgttccacttccagatgaggcgctggaagcctccaagaaggctgatgccgttttgttaggtgctgtgggtggtcctaaatggggtaccggtagtgttagacctgaacaaggtttactaaaaatccgtaaagaacttcaattgtacgccaacttaagaccatgtaactttgcatccgactctcttttagacttatctccaatcaagccacaatttgctaaaaatactgacttcgttgttgtcagagaattagtgggaggtatttactttggtaagagaaaggaagacgatggtgatggtgtcgcttgggatagtgaacaatacaccgttccagaagtgcaaagaatcacaagaatggccgctttcatggccctacaacatgagccaccattgcctatttggtccttggataaagctaatgttttggcctcttcaagattatggagaaaaactgtggaggaaaccatcaagaacgaattccctacattgaaggttcaacatcaattgattgattctgccgccatgatcctagttaagaacccaacccacctaaatggtattataatcaccagcaacatgtttggtgatatcatctccgatgaagcctccgttatcccaggttccttgggtttgttgccatctgcgtccttggcctctttgccagacaagaacaccgcatttggtttgtacgaaccatgccacggttctgctccagatttgccaaagaataaggtcaaccctatcgccactatcttgtctgctgcaatgatgttgaaattgtcattgaacttgcctgaagaaggtaaggccattgaagatgcagttaaaaaggttttggatgcaggtatcagaactggtgatttaggtggttccaacagtaccaccgaagtcggtgatgctgtcgccgaagaagttaagaaaatccttgcttaaaaagattctctttttttatgatatttgtacataaactttataaatgaaattcataatagaaacgacacgaaattacaaaatggaatatgttcatagggtagacgaaactatatacgcaatctacatacatttatcaagaaggagaaaaaggaggatgtaaaggaatacaggtaagcaaattgatactaatggctcaacgtgataaggaaaaagaattgcactttaacattaatattgacaaggaggagggcaccacacaaaaagttacagatctgctgcattaatgaatcggccaacgcgcggggagaggcggtttgcgtattgggcgctcttccgcttcctcgctcactgactcgctgcgctcggtcgttcggctgcggcgagcggtatcagcatcgatgaattccacggactatagactatactagtatactccgtctactgtacgatacacttccgctcaggtccttgtcctttaacgaggccttaccactcttttgttactctattgatccagctcagcaaaggcagtgtgatctaagattctatcttcgcgatgtagtaaaactagctagaccgagaaagagactagaaatgcaaaaggcacttctacaatggctgccatcattattatccgatgtgacgctgcagcttctcaatgatattcgaatacgctttgaggagatacagcctaatatccgacaaactgttttacagatttacgatcgtatttgttacccatcattgaattttgaacatccgaacctgggagttttccctgaaacagatagtatatttgaacctgtataataatatatagtctagcgctttacggaagacaatgtatgtatttcggttcctggagaaactattgcatctattgcataggtaatcttgcacgtcgcatccccggttcattttctgcgtttccatcttgcacttcaatagcatatctttgttaacgaagcatctgtgcttcattttgtagaacaaaaatgcaacgcgagagcgctaatttttcaaacaaagaatctgagctgcatttttacagaacagaaatgcaacgcgaaagcgctattttaccaacgaagaatctgtgcttcatttttgtaaaacaaaaatgcaacgcgagagcgctaatttttcaaacaaagaatctgagctgcatttttacagaacagaaatgcaacgcgagagcgctattttaccaacaaagaatctatacttcttttttgttctacaaaaatgcatcccgagagcgctatttttctaacaaagcatcttagattactttttttctcctttgtgcgctctataatgcagtctcttgataactttttgcactgtaggtccgttaaggttagaagaaggctactttggtgtctattttctcttccataaaaaaagcctgactccacttcccgcgtttactgattactagcgaagctgcgggtgcattttttcaagataaaggcatccccgattatattctataccgatgtggattgcgcatactttgtgaacagaaagtgatagcgttgatgattcttcattggtcagaaaattatgaacggtttcttctattttgtctctatatactacgtataggaaatgtttacattttcgtattgttttcgattcactctatgaatagttcttactacaatttttttgtctaaagagtaatactagagataaacataaaaaatgtagaggtcgagtttagatgcaagttcaaggagcgaaaggtggatgggtaggttatatagggatatagcacagagatatatagcaaagagatacttttgagcaatgtttgtggaagcggtattcgcaatattttagtagctcgttacagtccggtgcgtttttggttttttgaaagtgcgtcttcagagcgcttttggttttcaaaagcgctctgaagttcctatactttctagagaataggaacttcggaataggaacttcaaagcgtttccgaaaacgagcgcttccgaaaatgcaacgcgagctgcgcacatacagctcactgttcacgtcgcacctatatctgcgtgttgcctgtatatatatatacatgagaagaacggcatagtgcgtgtttatgcttaaatgcgtacttatatgcgtctatttatgtaggatgaaaggtagtctagtacctcctgtgatattatcccattccatgcggggtatcgtatgcttccttcagcactaccctttagctgttctatatgctgccactcctcaattggattagtctcatccttcaatgctatcatttcctttgatattggatcatatgcatagtaccgagaaactagtgcgaagtagtgatcaggtattgctgttatctgatgagtatacgttgtcctggccacggcagaagcacgcttatcgctccaatttcccacaacattagtcaactccgttaggcccttcattgaaagaaatgaggtcatcaaatgtcttccaatgtgagattttgggccattttttatagcaaagattgaataaggcgcatttttcttcaaagctttattgtacgatctgactaagttatcttttaataattggtattcctgtttattgcttgaagaattgccggtcctatttactcgttttaggactggttcagaattcatcgatgctcactcaaaggcggtaatacggttatccacagaatcaggggataacgcaggaaagaacatgtgagcaaaaggccagcaaaaggccaggaaccgtaaaaaggccgcgttgctggcgtttttccataggctccgcccccctgacgagcatcacaaaaatcgacgctcaagtcagaggtggcgaaacccgacaggactataaagataccaggcgtttccccctggaagctccctcgtgcgctctcctgttccgaccctgccgcttaccggatacctgtccgcctttctcccttcgggaagcgtggcgctttctcatagctcacgctgtaggtatctcagttcggtgtaggtcgttcgctccaagctgggctgtgtgcacgaaccccccgttcagcccgaccgctgcgccttatccggtaactatcgtcttgagtccaacccggtaagacacgacttatcgccactggcagcagccactggtaacaggattagcagagcgaggtatgtaggcggtgctacagagttcttgaagtggtggcctaactacggctacactagaagaacagtatttggtatctgcgctctgctgaagccagttaccttcggaaaaagagttggtagctcttgatccggcaaacaaaccaccgctggtagcggtggtttttttgtttgcaagcagcagattacgcgcagaaaaaaaggatctcaagaagatcctttgatc

SEQ ID NO: 30 - DNA, 9067 bp, Artificial Sequence
  source: /note="Description of Artificial Sequence: Synthetic polynucleotide"
  source: /note="bCBGA0305 vector"
taagattaatataattatataaaaatattatcttcttttctttatatctagtgttatgtaaaataaattgatgactacggaaagcttttttatattgtttctttttcattctgagccacttaaatttcgtgaatgttcttgtaagggacggtagatttacaagtgatacaacaaaaagcaaggcgctttttctaataaaaagaagaaaagcatttaacaattgaacacctctatatcaacgaagaatattactttgtctctaaatccttgtaaaatgtgtacgatctctatatgggttactcataagtgtaccgaagactgcattgaaagtttatgttttttcactggaggcgtcattttcgcgttgagaaaattcggtcgaaaaaagaaaaggagagggccaagagggagggcattggtgactattgagcacgtgagtatatacgtgattaagcacacaaaggcagcttggagttatgtctgttattaatttcacaggtagttctggtccattggtgaaagtttgcggcttgcagagcacagaggccgcagaatgtgctctagattccgatgctgacttgctgggtattatatgtgtgcccaatagaaagagaacaattgacccggttattgcaaggaaaatttcaagtcttgtaaaagcatataaaaatagttcaggcactccgaaatacttggttggcgtgtttcgtaatcaacctaaggaggatgttttggctctggtcaatgattacggcattgatatcgtccaactgcatggagatgagtcgtggcaagaataccaagagttcctcggtttgccagttattaaaagactcgtatttccaaaagactgcaacatactactcagtgcagcttcacagaaacctcactcgtttattcccttgtttgattcagaagcaggtgggacaggtgaacttttggattggaactcgatttctgactgggttggaaggcaagagagccccgaaagtttacattttatgttagctggtggactgacgccagaaaatgttggtgatgcgcttagattaaatggcgttattggtgttgatgtaagcggaggtgtggagacaaatggtgtaaaagactctaacaaaatagcaaatttcgtcaaaaatgctaagaaataggttattactgagtagtatttatttaagtattgtttgtgcacttgcccagatctgctgcattaatgaatcggccaacgcgcggggagaggcggtttgcgtattgggcgctcttccgcttcctcgctcactgactcgctgcgctcggtcgttcggctgcggcgagcggtatcagcatcgatgaattccacggactatagactatactagtatactccgtctactgtacgatacacttccgctcaggtccttgtcctttaacgaggccttaccactcttttgttactctattgatccagctcagcaaaggcagtgtgatctaagattctatcttcgcgatgtagtaaaactagctagaccgagaaagagactagaaatgcaaaaggcacttctacaatggctgccatcattattatccgatgtgacgctgcagcttctcaatgatattcgaatacgctttgaggagatacagcctaatatccgacaaactgttttacagatttacgatcgtatttgttacccatcattgaattttgaacatccgaacctgggagttttccctgaaacagatagtatatttgaacctgtataataatatatagtctagcgctttacggaagacaatgtatgtatttcggttcctggagaaactattgcatctattgcataggtaatcttgcacgtcgcatccccggttcattttctgcgtttccatcttgcacttcaatagcatatctttgttaacgaagcatctgtgcttcattttgtagaacaaaaatgcaacgcgagagcgctaatttttcaaacaaagaatctgagctgcatttttacagaacagaaatgcaacgcgaaagcgctattttaccaacgaagaatctgtgcttcatttttgtaaaacaaaaatgcaacgcgagagcgctaatttttcaaacaaagaatctgagctgcatttttacagaacagaaatgcaacgcgagagcgctattttaccaacaaagaatctatacttcttttttgttctacaaaaatgcatcccgagagcgctatttttctaacaaagcatcttagattactttttttctcctttgtgcgctctataatgcagtctcttgataactttttgcactgtaggtccgttaaggttagaagaaggctactttggtgtctattttctcttccataaaaaaagcctgactccacttcccgcgtttactgattactagcgaagctgcgggtgcattttttcaagataaaggcatccccgattatattctataccgatgtggattgcgcatactttgtgaacagaaagtgatagcgttgatgattcttcattggtcagaaaattatgaacggtttcttctattttgtctctatatactacgtataggaaatgtttacattttcgtattgttttcgattcactctatgaatagttcttactacaatttttttgtctaaagagtaatactagagataaacataaaaaatgtagaggtcgagtttagatgcaagttcaaggagcgaaaggtggatgggtaggttatatagggatatagcacagagatatatagcaaagagatacttttgagcaatgtttgtggaagcggtattcgcaatattttagtagctcgttacagtccggtgcgtttttggttttttgaaagtgcgtcttcagagcgcttttggttttcaaaagcgctctgaagttcctatactttctagagaataggaacttcggaataggaacttcaaagcgtttccgaaaacgagcgcttccgaaaatgcaacgcgagctgcgcacatacagctcactgttcacgtcgcacctatatctgcgtgttgcctgtatatatatatacatgagaagaacggcatagtgcgtgtttatgcttaaatgcgtacttatatgcgtctatttatgtaggatgaaaggtagtctagtacctcctgtgatattatcccattccatgcggggtatcgtatgcttccttcagcactaccctttagctgttctatatgctgccactcctcaattggattagtctcatccttcaatgctatcatttcctttgatattggatcatatgcatagtaccgagaaactagtgcgaagtagtgatcaggtattgctgttatctgatgagtatacgttgtcctggccacggcagaagcacgcttatcgctccaatttcccacaacattagtcaactccgttaggcccttcattgaaagaaatgaggtcatcaaatgtcttccaatgtgagattttgggccattttttatagcaaagattgaataaggcgcatttttcttcaaagctttattgtacgatctgactaagttatcttttaataattggtattcctgtttattgcttgaagaattgccggtcctatttactcgttttaggactggttcagaattcatcgatgctcactcaaaggcggtaatacggttatccacagaatcaggggataacgcaggaaagaacatgtgagcaaaaggccagcaaaaggccaggaaccgtaaaaaggccgcgttgctggcgtttttccataggctccgcccccctgacgagcatcacaaaaatcgacgctcaagtcagaggtggcgaaacccgacaggactataaagataccaggcgtttccccctggaagctccctcgtgcgctctcctgttccgaccctgccgcttaccggatacctgtccgcctttctcccttcgggaagcgtggcgctttctcatagctcacgctgtaggtatctcagttcggtgtaggtcgttcgctccaagctgggctgtgtgcacgaaccccccgttcagcccgaccgctgcgccttatccggtaactatcgtcttgagtccaacccggtaagacacgacttatcgccactggcagcagccactggtaacaggattagcagagcgaggtatgtaggcggtgctacagagttcttgaagtggtggcctaactacggctacactagaagacagtatttggtatctgcgctctgctgaagccagttaccttcggaaaaagagttggtagctcttgatccggcaaacaaaccaccgctggtagcggtggtttttttgtttgcaagcagcagattacgcgcagaaaaaaaggatctcaagaagatcctttgatcttttctacggggtctgacgctcagtggaacgaaaactcacgttaagggattttggtcatgagattatcaaaaaggatcttcacctagatccttttaaattaaaaatgaagttttaaatcaatctaaagtatatatgagtaaacttggtctgacagttaccaatgcttaatcagtgaggcacctatctcagcgatctgtctatttcgttcatccatagttgcctgactccccgtcgtgtagataactacgatacgggagggcttaccatctggccccagtgctgcaatgataccgcgagacccacgctcaccggctccagatttatcagcaataaaccagccagccggaagggccgagcgcagaagtggtcctgcaactttatccgcctccatccagtctattaattgttgccgggaagctagagtaagtagttcgccagttaatagtttgcgcaacgttgttgccattgctacaggcatcgtggtgtcacgctcgtcgtttggtatggcttcattcagctccggttcccaacgatcaaggcgagttacatgatcccccatgttgtgcaaaaaagcggttagctccttcggtcctccgatcgttgtcagaagtaagttggccgcagtgttatcactcatggttatggcagcactgcataattctcttactgtcatgccatccgtaagatgcttttctgtgactggtgagtactcaaccaagtcattctgagaatagtgtatgcggcgaccgagttgctcttgcccggcgtcaatacgggataataccgcgccacatagcagaactttaaaagtgctcatcattggaaaacgttcttcggggcgaaaactctcaaggatcttaccgctgttgagatccagttcgatgtaacccactcgtgcacccaactgatcttcagcatcttttactttcaccagcgtttctgggtgagcaaaaacaggaaggcaaaatgccgcaaaaaagggaataagggcgacacggaaatgttgaatactcatactcttcctttttcaatattattgaagcatttatcagggttattgtctcatgagcggatacatatttgaatgtatttagaaaaataaacaaataggggttccgcgcacatttccccgaaaagtgccacctgacgtctaagaaaccattattatcatgacattaacctataaaaataggcgtatcacgaggccctttcgtctcgcgcgtttcggtgatgacggtgaaaacctctgacacatgcagctcccggagacggtcacagcttgtctgtaagcggatgccgggagcagacaagcccgtcagggcgcgtcagcgggtgttggcgggtgtcggggctggcttaactatgcggcatcagagcagattgtactgagagtgcaccatatgcggtgtgaaataccgcacagatgcgtaaggagaaaataccgcatcaggcgccattcgccattcaggctgcgcaactgttgggaagggcgatcggtgcgggcctcttcgctattacgccagctggcgaaagggggatgtgctgcaaggcgattaagttgggtaacgccagggttttcccagtcacgacgttgtaaaacgacggccagtgaattgcggccgcatcgatggaaaagaccaaacggtgacgttaagagaaagaaattctatgaggcaagtaagaggcactattactgatgtgatttcgaccattgacaaaatgcttcacaaccctgatgaatcggactgggataaatcaacatttggactgtcgcctgttaagatataactgaaaaaagaggggaatttttagatactgaaatgatattttagaataaccagactatatataaggataaattacaaaaaattaactaatagataagatttaaatataaaagatatgcaactagaaaagtcttatcaatctccttattcaaaatgagaaaattgttgtctcaagactcttctcatgatcttatttgtagcagttcttggcaaagatgacaatggaacaactctagtaactttaaacaatgggttcaatttcttttgtaaacccaaattaaaagacaatctcaattggttcaaatcaattgtagtatcatttgaatctttcaaaacaaagaaaataaccaattgttctggaccaccacctaatggtggaacaccaatagctgtagtttcaaaaactctatcatcaacttcgttacaaactctttcgatttcgatagatgagattttaataccaccaatattcattgtatcatcagctctaccatgtgcatggtagtaaccgttagaagtcaattcgaagatgtcaccatgtcttctcaaaacttcaccattcaatgttggcatacccttgaagtaaacatcatgatggttaccgttcaacaaagtctttgaagcaccgaacataactggacctaatgccaattcaccaatacctggcttatttttaggcattgggtaaccgttcttatccaagatgtacaatgtacaacccatacattgagatgaaaaagatgacaaagattgagcttgcaaaaatgaaccagctgaaaatgcaccaccaatttcagtaccaccacacatttcaataactggcttgtagttagctctacccatcaaccacaaatattcatcaacgttagatgcttcaccagatgaagagaaacatctgattgtagaccaatcgtaacctgaaacacagttagtagacttccatgatctaacgattgatggaacaacacccaacattgtaaccttagcatcttgaacgaactttgcgaaaccagaaaccaatggtgaaccgttgtacaaagcgatagatgcaccgttcaacaatgaagcataaaccaaccatggacccatcatccaacccaaattagttggccaaacaataacgtcaccttttctaatatccaaatgtgaccaaccatcagctgcagcttttaatggtgtagcttgagtccatggaattgcttttggttcacctgtagtacctgaagaaaacaagatgtttgtgtaagcatcaactggttgttctcttgcagtgaattcacagtttttgaattccttagctctttccaaaaagtaatcccatgaaatgtcaccatctcttaattctgcaccaatgttagaacctgaacatgggataacgatagccattggagactttgcttcaacaactcttgagtacaatggaattctctttttacctctaatgatatgatcttgtgtaaaaatagcctttgccttagacaatctcaatctagttgagatttctggagcagaaaatgaatctgcaatagaaacaacaacgtaaccagccaaaacgattgccaaatatataacaacagcatcaacatgcattggcatatcaatagcaattgcacaacctttttccaaacccatttcttctaatgcgtaaccaaccaaccaaactctttttctcaattgatccaatgtcaacttattcaatggcaaatcatcgttaccctcatctctccaaacgatcatagtatcgttcaatttcttattagagttaacgttcaaacaatttttagctgaattcaaataaccacctggcaaccattcagaaccacctggattgttgatatcatctcttctcaagatacattctggatctttagaaaatgagatcttcatttcatccatcaaaactgttctccagtaaacttctgggtttctaacagaaaattcttgaaaatgtgaaaatgaagagattggatctttgtacttaacacccaagaattctttacctctcttttccaacaaagcacccaaattagtagacttaaccttttctggatctggaatccaagctggtggtgctggaccgaaatccttgtaacaaccataaaacaacatttgatgcaaagaaaatggcaaatctggtgacaagatatggtttgcgatgttgatccatgtttgtggagttgcagcaccgtagttacaaacgatttcagccaatctaccatgcaatgtttctgcaacttcagaagtaatacccaaagcaatgaaatctgatgcaacaacagaatccaatgacttgtaatttttacccatttatattgaattttcaaaaattcttactttttttttggatggacgcaaagaagtttaataatcatattacatggcattaccaccatatacatatccatatctaatcttacttatatgttgtggaaatgtaaagagccccattatcttagcctaaaaaaaccttctctttggaactttcagtaatacgcttaactgctcattgctatattgaagtacggattagaagccgccgagcgggcgacagccctccgacggaagactctcctccgtgcgtcctcgtcttcaccggtcgcgttcctgaaacgcagatgtgcctcgcgccgcactgctccgaacaataaagattctacaatactagcttttatggttatgaagaggaaaaattggcagtaacctggccccacaaaccttcaaattaacgaatcaaattaacaaccataggatgataatgcgattagttttttagccttatttctggggtaattaatcagcgaagcgatgatttttgatctattaacagatatataaatggaaaagctgcataaccactttaactaatactttcaacattttcagtttgtattacttcttattcaaatgtcataaaagtatcaacaaaaaattgttaatatacctctatactttaacgtcaaggagaaaaaactata

SEQ ID NO: 31 - DNA, 2037 bp, Artificial Sequence
  source: /note="Description of Artificial Sequence: Synthetic polynucleotide"
  source: /note="ERG20mut-dPT"
atggcttcagaaaaagaaattaggagagagagattcttgaacgttttccctaaattagtagaggaattgaacgcatcgcttttggcttacggtatgcctaaggaagcatgtgactggtatgcccactcattgaactacaacactccaggcggtaagctaaatagaggtttgtccgttgtggacacgtatgctattctctccaacaagaccgttgaacaattggggcaagaagaatacgaaaaggttgccattctaggttggtgcattgagttgttgcaggcttactggttggtcgccgatgatatgatggacaagtccattaccagaagaggccaaccatgttggtacaaggttcctgaagttggggaaattgccatctgggacgcattcatgttagaggctgctatctacaagcttttgaaatctcacttcagaaacgaaaaatactacatagatatcaccgaattgttccatgaggtcaccttccaaaccgaattgggccaattgatggacttaatcactgcacctgaagacaaagtcgacttgagtaagttctccctaaagaagcactccttcatagttactttcaagactgcttactattctttctacttgcctgtcgcattggccatgtacgttgccggtatcacggatgaaaaggatttgaaacaagccagagatgtcttgattccattgggtgaatacttccaaattcaagatgactacttagactgcttcggtaccccagaacagatcggtaagatcggtacagatatccaagataacaaatgttcttgggtaatcaacaaggcattggaacttgcttccgcagaacaaagaaagactttagacgaaaattacggtaagaaggactcagtcgcagaagccaaatgcaaaaagattttcaatgacttgaaaattgaacagctataccacgaatatgaagagtctattgccaaggatttgaaggccaaaatttctcaggtcgatgagtctcgtggcttcaaagctgatgtcttaactgcgttcttgaacaaagtttacaagagaagcaaaggtagcggcagcggtagcggtagcggcagcattgaaggttcaccacatcatgaatctgataactcaatcgcaactaaaattttgaactttggtcatacatgttggaaattgcaaagaccatacgttgttaagggtatgatttctattgcttgtggtttatttggtagagaattgtttaataacagacatttgttttcttggggtttgatgtggaaagcatttttcgcattagttccaatcttgtcttttaatttctttgctgcaatcatgaaccaaatatatgatgttgatattgatagaattaataagccagatttgccattggtttctggtgaaatgtcaatcgaaactgcttggattttatctatcatcgttgcattgactggtttgatcgttacaattaaattaaaatcagctccattgttcgtttttatatatatcttcggtatcttcgctggttttgcatactctgttccaccaattagatggaagcaatacccttttactaatttcttgatcacaatttcttcacatgttggtttggcttttacttcttactcagctactacatctgcattaggtttgccatttgtttggaggccagctttttcttttattatcgcttttatgactgttatgggtatgacaatcgctttcgcaaaggatatctctgatattgaaggtgacgctaaatacggtgtttcaactgttgctacaaaattgggtgcaagaaacatgactttcgttgtttctggtgttttgttgttgaactatttggtttctatctcaatcggtattatttggccacaagtttttaaatctaacatcatgatcttgtcacatgctatcttggcattctgtttgatcttccaaacaagagaattagctttggcaaattatgcttctgcaccatcaagacaatttttcgagtttatttggttgttgtactacgctgaatattttgtttacgtttttatttga

SEQ ID NO: 32 - protein, 678 aa, Artificial Sequence
  source: /note="Description of Artificial Sequence: Synthetic polypeptide"
  source: /note="ERG20mut-dPT"
MASEKEIRRERFLNVFPKLVEELNASLLAYGMPKEACDWYAHSLNYNTPGGKLNRGLSVVDTYAILSNKTVEQLGQEEYEKVAILGWCIELLQAYWLVADDMMDKSITRRGQPCWYKVPEVGEIAIWDAFMLEAAIYKLLKSHFRNEKYYIDITELFHEVTFQTELGQLMDLITAPEDKVDLSKFSLKKHSFIVTFKTAYYSFYLPVALAMYVAGITDEKDLKQARDVLIPLGEYFQIQDDYLDCFGTPEQIGKIGTDIQDNKCSWVINKALELASAEQRKTLDENYGKKDSVAEAKCKKIFNDLKIEQLYHEYEESIAKDLKAKISQVDESRGFKADVLTAFLNKVYKRSKGSGSGSGSGSIEGSPHHESDNSIATKILNFGHTCWKLQRPYVVKGMISIACGLFGRELFNNRHLFSWGLMWKAFFALVPILSFNFFAAIMNQIYDVDIDRINKPDLPLVSGEMSIETAWILSIIVALTGLIVTIKLKSAPLFVFIYIFGIFAGFAYSVPPIRWKQYPFTNFLITISSHVGLAFTSYSATTSALGLPFVWRPAFSFIIAFMTVMGMTIAFAKDISDIEGDAKYGVSTVATKLGARNMTFVVSGVLLLNYLVSISIGIIWPQVFKSNIMILSHAILAFCLIFQTRELALANYASAPSRQFFEFIWLLYYAEYFVYVFI

SEQ ID NO: 33 - DNA, 9996 bp, Artificial Sequence
  source: /note="Description of Artificial Sequence: Synthetic polynucleotide"
  source: /note="bCBGA0559 vector"
attgaaggttcaccacatcatgaatctgataactcaatcgcaactaaaattttgaactttggtcatacatgttggaaattgcaaagaccatacgttgttaagggtatgatttctattgcttgtggtttatttggtagagaattgtttaataacagacatttgttttcttggggtttgatgtggaaagcatttttcgcattagttccaatcttgtcttttaatttctttgctgcaatcatgaaccaaatatatgatgttgatattgatagaattaataagccagatttgccattggtttctggtgaaatgtcaatcgaaactgcttggattttatctatcatcgttgcattgactggtttgatcgttacaattaaattaaaatcagctccattgttcgtttttatatatatcttcggtatcttcgctggttttgcatactctgttccaccaattagatggaagcaatacccttttactaatttcttgatcacaatttcttcacatgttggtttggcttttacttcttactcagctactacatctgcattaggtttgccatttgtttggaggccagctttttcttttattatcgcttttatgactgttatgggtatgacaatcgctttcgcaaaggatatctctgatattgaaggtgacgctaaatacggtgtttcaactgttgctacaaaattgggtgcaagaaacatgactttcgttgtttctggtgttttgttgttgaactatttggtttctatctcaatcggtattatttggccacaagtttttaaatctaacatcatgatcttgtcacatgctatcttggcattctgtttgatcttccaaacaagagaattagctttggcaaattatgcttctgcaccatcaagacaatttttcgagtttatttggttgttgtactacgctgaatattttgtttacgtttttatttgagattaatataattatataaaaatattatcttcttttctttatatctagtgttatgtaaaataaattgatgactacggaaagcttttttatattgtttctttttcattctgagccacttaaatttcgtgaatgttcttgtaagggacggtagatttacaagtgatacaacaaaaagcaaggcgctttttctaataaaaagaagaaaagcatttaacaattgaacacctctatatcaacgaagaatattactttgtctctaaatccttgtaaaatgtgtacgatctctatatgggttactcataagtgtaccgaagactgcattgaaagtttatgttttttcactggaggcgtcattttcgcgttgagaacaattgtcctgtacttccttgttcatgtgtgttcaaaaacgttatatttataggataattatactctatttctcaacaagtaattggttgtttggccgagcggtctaaggcgcctgattcaagaaatatcttgaccgcagttaactgtgggaatactcaggtatcgtaagatgcaagagttcgaatctcttagcaaccattatttttttcctcaacataacgagaacacacaggggcgctatcgcacagaatcaaattcgatgactggaaattttttgttaatttcagaggtcgcctgacgcatatacctttttcaactgaaaaattgggagaaaaaggaaaggtgagagcgccggaaccggcttttcatatagaatagagaagcgttcatgactaaatgcttgcatcacaatacttgaagttgacaatattatttaaggacctattgttttttccaataggtggttagcaatcgtcttactttctaacttttcttaccttttacatttcagcaatatatatatatatttcaaggatataccattctaatgtctgcccctaagaagatcgtcgttttgccaggtgaccacgttggtcaagaaatcacagccgaagccattaaggttcttaaagctatttctgatgttcgttccaatgtcaagttcgatttcgaaaatcatttaattggtggtgctgctatcgatgctacaggtgttccacttccagatgaggcgctggaagcctccaagaaggctgatgccgttttgttaggtgctgtgggtggtcctaaatggggtaccggtagtgttagacctgaacaaggtttactaaaaatccgtaaagaacttcaattgtacgccaacttaagaccatgtaactttgcatccgactctcttttagacttatctccaatcaagccacaatttgctaaaaatactgacttcgttgttgtcagagaattagtgggaggtatttactttggtaagagaaaggaagacgatggtgatggtgtcgcttgggatagtgaacaatacaccgttccagaagtgcaaagaatcacaagaatggccgctttcatggccctacaacatgagccaccattgcctatttggtccttggataaagctaatgttttggcctcttcaagattatggagaaaaactgtggaggaaaccatcaagaacgaattccctacattgaaggttcaacatcaattgattgattctgccgccatgatcctagttaagaacccaacccacctaaatggtattataatcaccagcaacatgtttggtgatatcatctccgatgaagcctccgttatcccaggttccttgggtttgttgccatctgcgtccttggcctctttgccagacaagaacaccgcatttggtttgtacgaaccatgccacggttctgctccagatttgccaaagaataaggtcaaccctatcgccactatcttgtctgctgcaatgatgttgaaattgtcattgaacttgcctgaagaaggtaaggccattgaagatgcagttaaaaaggttttggatgcaggtatcagaactggtgatttaggtggttccaacagtaccaccgaagtcggtgatgctgtcgccgaagaagttaagaaaatccttgcttaaaaagattctctttttttatgatatttgtacataaactttataaatgaaattcataatagaaacgacacgaaattacaaaatggaatatgttcatagggtagacgaaactatatacgcaatctacatacatttatcaagaaggagaaaaaggaggatgtaaaggaatacaggtaagcaaattgatactaatggctcaacgtgataaggaaaaagaattgcactttaacattaatattgacaaggaggagggcaccacacaaaaagttacagatctgctgcattaatgaatcggccaacgcgcggggagaggcggtttgcgtattgggcgctcttccgcttcctcgctcactgactcgctgcgctcggtcgttcggctgcggcgagcggtatcagcatcgatgaattccacggactatagactatactagtatactccgtctactgtacgatacacttccgctcaggtccttgtcctttaacgaggccttaccactcttttgttactctattgatccagctcagcaaaggcagtgtgatctaagattctatcttcgcgatgtagtaaaactagctagaccgagaaagagactagaaatgcaaaaggcacttctacaatggctgccatcattattatccgatgtgacgctgcagcttctcaatgatattcgaatacgctttgaggagatacagcctaatatccgacaaactgttttacagatttacgatcgtatttgttacccatcattgaattttgaacatccgaacctgggagttttccctgaaacagatagtatatttgaacctgtataataatatatagtctagcgctttacggaagacaatgtatgtatttcggttcctggagaaactattgcatctattgcataggtaatcttgcacgtcgcatccccggttcattttctgcgtttccatcttgcacttcaatagcatatctttgttaacgaagcatctgtgcttcattttgtagaacaaaaatgcaacgcgagagcgctaatttttcaaacaaagaatctgagctgcatttttacagaacagaaatgcaacgcgaaagcgctattttaccaacgaagaatctgtgcttcatttttgtaaaacaaaaatgcaacgcgagagcgctaatttttcaaacaaagaatctgagctgcatttttacagaacagaaatgcaacgcgagagcgctattttaccaacaaagaatctatacttcttttttgttctacaaaaatgcatcccgagagcgctatttttctaacaaagcatcttagattactttttttctcctttgtgcgctctataatgcagtctcttgataactttttgcactgtaggtccgttaaggttagaagaaggctactttggtgtctattttctcttccataaaaaaagcctgactccacttcccgcgtttactgattactagcgaagctgcgggtgcattttttcaagataaaggcatccccgattatattctataccgatgtggattgcgcatactttgtgaacagaaagtgatagcgttgatgattcttcattggtcagaaaattatgaacggtttcttctattttgtctctatatactacgtataggaaatgtttacattttcgtattgttttcgattcactctatgaatagttcttactacaatttttttgtctaaagagtaatactagagataaacataaaaaatgtagaggtcgagtttagatgcaagttcaaggagcgaaaggtggatgggtaggttatatagggatatagcacagagatatatagcaaagagatacttttgagcaatgtttgtggaagcggtattcgcaatattttagtagctcgttacagtccggtgcgtttttggttttttgaaagtgcgtcttcagagcgcttttggttttcaaaagcgctctgaagttcctatactttctagagaataggaacttcggaataggaacttcaaagcgtttccgaaaacgagcgcttccgaaaatgcaacgcgagctgcgcacatacagctcactgttcacgtcgcacctatatctgcgtgttgcctgtatatatatatacatgagaagaacggcatagtgcgtgtttatgcttaaatgcgtacttatatgcgtctatttatgtaggatgaaaggtagtctagtacctcctgtgatattatcccattccatgcggggtatcgtatgcttccttcagcactaccctttagctgttctatatgctgccactcctcaattggattagtctcatccttcaatgctatcatttcctttgatattggatcatatgcatagtaccgagaaactagtgcgaagtagtgatcaggtattgctgttatctgatgagtatacgttgtcctggccacggcagaagcacgcttatcgctccaatttcccacaacattagtcaactccgttaggcccttcattgaaagaaatgaggtcatcaaatgtcttccaatgtgagattttgggccattttttatagcaaagattgaataaggcgcatttttcttcaaagctttattgtacgatctgactaagttatcttttaataattggtattcctgtttattgcttgaagaattgccggtcctatttactcgttttaggactggttcagaattcatcgatgctcactcaaaggcggtaatacggttatccacagaatcaggggataacgcaggaaagaacatgtgagcaaaaggccagcaaaaggccaggaaccgtaaaaaggccgcgttgctggcgtttttccataggctccgcccccctgacgagcatcacaaaaatcgacgctcaagtcagaggtggcgaaacccgacaggactataaagataccaggcgtttccccctggaagctccctcgtgcgctctcctgttccgaccctgccgcttaccggatacctgtccgcctttctcccttcgggaagcgtggcgctttctcatagctcacgctgtaggtatctcagttcggtgtaggtcgttcgctccaagctgggctgtgtgcacgaaccccccgttcagcccgaccgctgcgccttatccggtaactatcgtcttgagtccaacccggtaagacacgacttatcgccactggcagcagccactggtaacaggattagcagagcgaggtatgtaggcggtgctacagagttcttgaagtggtggcctaactacggctacactagaagaacagtatttggtatctgcgctctgctgaagccagttaccttcggaaaaagagttggtagctcttgatccggcaaacaaaccaccgctggtagcggtggtttttttgtttgcaagcagcagattacgcgcagaaaaaaaggatctcaagaagatcctttgatcttttctacggggtctgacgctcagtggaacgaaaactcacgttaagggattttggtcatgagattatcaaaaaggatcttcacctagatccttttaaattaaaaatgaagttttaaatcaatctaaagtatatatgagtaaacttggtctgacagttaccaatgcttaatcagtgaggcacctatctcagcgatctgtctatttcgttcatccatagttgcctgactccccgtcgtgtagataactacgatacgggagggcttaccatctggccccagtgctgcaatgataccgcgagacccacgctcaccggctccagatttatcagcaataaaccagccagccggaagggccgagcgcagaagtggtcctgcaactttatccgcctccatccagtctattaattgttgccgggaagctagagtaagtagttcgccagttaatagtttgcgcaacgttgttgccattgctacaggcatcgtggtgtcacgctcgtcgtttggtatggcttcattcagctccggttcccaacgatcaaggcgagttacatgatcccccatgttgtgcaaaaaagcggttagctccttcggtcctccgatcgttgtcagaagtaagttggccgcagtgttatcactcatggttatggcagcactgcataattctcttactgtcatgccatccgtaagatgcttttctgtgactggtgagtactcaaccaagtcattctgagaatagtgtatgcggcgaccgagttgctcttgcccggcgtcaatacgggataataccgcgccacatagcagaactttaaaagtgctcatcattggaaaacgttcttcggggcgaaaactctcaaggatcttaccgctgttgagatccagttcgatgtaacccactcgtgcacccaactgatcttcagcatcttttactttcaccagcgtttctgggtgagcaaaaacaggaaggcaaaatgccgcaaaaaagggaataagggcgacacggaaatgttgaatactcatactcttcctttttcaatattattgaagcatttatcagggttattgtctcatgagcggatacatatttgaatgtatttagaaaaataaacaaataggggttccgcgcacatttccccgaaaagtgccacctgacgtctaagaaaccattattatcatgacattaacctataaaaataggcgtatcacgaggccctttcgtctcgcgcgtttcggtgatgacggtgaaaacctctgacacatgcagctcccggagacggtcacagcttgtctgtaagcggatgccgggagcagacaagcccgtcagggcgcgtcagcgggtgttggcgggtgtcggggctggcttaactatgcggcatcagagcagattgtactgagagtgcaccatatgcggtgtggaataccgcacagatgcgtaaggagaaaataccgcatcaggcgccattcgccattcaggctgcgcaactgttgggaagggcgatcggtgcgggcctcttcgctattacgccagctggcgaaagggggatgtgctgcaaggcgattaagttgggtaacgccagggttttcccagtcacgacgttgtaaaacgacggccagtgaattgcggccgcatcgatggaaaagaccaaacggtgacgttaagagaaagaaattctatgaggcaagtaagaggcactattactgatgtgatttcgaccattgacaaaatgcttcacaaccctgatgaatcggactgggataaatcaacatttggactgtcgcctgttaagatataactgaaaaaagaggggaatttttagatactgaaatgatattttagaataaccagactatatataaggataaattacaaaaaattaactaatagataagatttaaatataaaagatatgcaactagaaaagtcttatcaatctccttattatattgaattttcaaaaattcttactttttttttggatggacgcaaagaagtttaataatcatattacatggcattaccaccatatacatatccatatctaatcttacttatatgttgtggaaatgtaaagagccccattatcttagcctaaaaaaaccttctctttggaactttcagtaatacgcttaactgctcattgctatattgaagtacggattagaagccgccgagcgggcgacagccctccgacggaagactctcctccgtgcgtcctcgtcttcaccggtcgcgttcctgaaacgcagatgtgcctcgcgccgcactgctccgaacaataaagattctacaatactagcttttatggttatgaagaggaaaaattggcagtaacctggccccacaaaccttcaaattaacgaatcaaattaacaaccataggatgataatgcgattagttttttagccttatttctggggtaattaatcagcgaagcgatgatttttgatctattaacagatatataaatggaaaagctgcataaccactttaactaatactttcaacattttcagtttgtattacttcttattcaaatgtcataaaagtatcaacaaaaaattgttaatatacctctatactttaacgtcaaggagaaaaaactataatggcttcagaaaaagaaattaggagagagagattcttgaacgttttccctaaattagtagaggaattgaacgcatcgcttttggcttacggtatgcctaaggaagcatgtgactggtatgcccactcattgaactacaacactccaggcggtaagctaaatagaggtttgtccgttgtggacacgtatgctattctctccaacaagaccgttgaacaattggggcaagaagaatacgaaaaggttgccattctaggttggtgcattgagttgttgcaggcttactggttggtcgccgatgatatgatggacaagtccattaccagaagaggccaaccatgttggtacaaggttcctgaagttggggaaattgccatctgggacgcattcatgttagaggctgctatctacaagcttttgaaatctcacttcagaaacgaaaaatactacatagatatcaccgaattgttccatgaggtcaccttccaaaccgaattgggccaattgatggacttaatcactgcacctgaagacaaagtcgacttgagtaagttctccctaaagaagcactccttcatagttactttcaagactgcttactattctttctacttgcctgtcgcattggccatgtacgttgccggtatcacggatgaaaaggatttgaaacaagccagagatgtcttgattccattgggtgaatacttccaaattcaagatgactacttagactgcttcggtaccccagaacagatcggtaagatcggtacagatatccaagataacaaatgttcttgggtaatcaacaaggcattggaacttgcttccgcagaacaaagaaagactttagacgaaaattacggtaagaaggactcagtcgcagaagccaaatgcaaaaagattttcaatgacttgaaaattgaacagctataccacgaatatgaagagtctattgccaaggatttgaaggccaaaatttctcaggtcgatgagtctcgtggcttcaaagctgatgtcttaactgcgttcttgaacaaagtttacaagagaagcaaa

SEQ ID NO: 34 - DNA, 8817 bp, Artificial Sequence
  source: /note="Description of Artificial Sequence: Synthetic polynucleotide"
  source: /note="RUNM001233_51.1 vector"
aaaagaccaaacggtgacgttaagagaaagaaattctatgaggcaagtaagaggcactattactgatgtgatttcgaccattgacaaaatgcttcacaaccctgatgaatcggactgggataaatcaacatttggactgtcgcctgttaagatataactgaaaaaagaggggaatttttagatactgaaatgatattttagaataaccagactatatataaggataaattacaaaaaattaactaatagataagatttaaatataaaagatatgcaactagaaaagtcttatcaatctccttatattgaattttcaaaaattcttactttttttttggatggacgcaaagaagtttaataatcatattacatggcattaccaccatatacatatccatatctaatcttacttatatgttgtggaaatgtaaagagccccattatcttagcctaaaaaaaccttctctttggaactttcagtaatacgcttaactgctcattgctatattgaagtacggattagaagccgccgagcgggcgacagccctccgacggaagactctcctccgtgcgtcctcgtcttcaccggtcgcgttcctgaaacgcagatgtgcctcgcgccgcactgctccgaacaataaagattctacaatactagcttttatggttatgaagaggaaaaattggcagtaacctggccccacaaaccttcaaattaacgaatcaaattaacaaccataggatgataatgcgattagttttttagccttatttctggggtaattaatcagcgaagcgatgatttttgatctattaacagatatataaatggaaaagctgcataaccactttaactaatactttcaacattttcagtttgtattacttcttattcaaatgtcataaaagtatcaacaaaaaattgttaatatacctctatactttaacgtcaaggagaaaaaactataatgaactgctccgcattctctttctggttcgtctgtaaaataatcttcttcttcttgtccttcaacatccaaatctccatcgcaaatccacaagaaaactttttgaagtgtttctccgaatacatcccaaacaaccctgctaacccaaagtttatatatactcaacatgatcaattgtacatgtccgttttgaacagtaccatccaaaatttgagattcacttctgacactacaccaaaacctttagtcattgttacaccttccaatgttagtcacattcaagcttctatattgtgctctaagaaagtaggtttgcaaatcagaactagatcaggtggtcatgatgcagaaggcatgtcttacatctcacaagttccattcgttgtagtcgatttgagaaatatgcattccataaagatcgacgttcacagtcaaacagcatgggtagaagcaggtgccaccttgggtgaagtttactactggatcaacgaaaagaatgaaaacttttctttccctggtggttactgtccaacagtaggtgtcggtggtcacttttctggtggtggttatggtgcattgatgagaaactacggtttagctgcagataatattatagacgcccatttggttaacgtagatggtaaagttttggacagaaagtctatgggtgaagatttgttttgggccataagaggtggtggtggtgaaaatttcggtatcattgccgcttggaaaattaagttagtcgctgttccttccaaaagtactattttctctgtcaaaaagaacatggaaatccacggtttggttaagttgtttaataagtggcaaaacatcgcttacaagtacgataaggacttggttttgatgacccatttcatcactaaaaatattacagataaccatggtaaaaataagaccactgttcacggttatttttcttcaattttccatggtggtgtagattctttggttgatttgatgaataagtcattcccagaattgggtattaaaaagacagattgcaaggaattttcttggatagacacaaccatcttctattcaggtgttgtaaacttcaacaccgctaacttcaaaaaggaaatcttgttggatagatccgctggtaaaaagaccgctttttctattaaattggactacgttaagaaaccaatccctgaaactgcaatggtcaagatattggaaaagttgtacgaagaagatgtaggtgtcggcatgtacgttttgtatccatacggtggtattatggaagaaatatctgaatcagccataccatttcctcacagagctggtatcatgtatgaattatggtacacagcctcatgggaaaagcaagaagataacgaaaagcatatcaactgggtcagatccgtttacaacttcactacaccttacgttagtcaaaacccaagattggcatatttgaactacagagatttggacttaggtaaaactaaccctgaatctccaaataactatacacaagcaagaatttggggtgaaaagtactttggtaaaaatttcaacagattagttaaagtaaagactaaagccgaccctaacaactttttcagaaacgaacaatccatcccacctttgccacctcaccaccactaataagattaatataattatataaaaatattatcttcttttctttatatctagtgttatgtaaaataaattgatgactacggaaagcttttttatattgtttctttttcattctgagccacttaaatttcgtgaatgttcttataagggacggtagatttacaagtgatacaacaaaaagcaaggcgctttttctaataaaaagaagaaaagcatttaacaattgaacacctctatatcaacgaagaatattactttgtctctaaatccttgtaaaatgtgtacgatctctatatgggttactcagaagtgtaccgaagactgcattgaaagtttatgttttttcactgcaagcgtcattttcgcgttgagaagaatttcatcattttttttttattcttttttttgatttcggtttccttgaaatttttttgattcggtaatctccgaacagaaggaagaacgaaggaaggagcacagacttagattggtatatatacgcatatgtagtgttgaagaaacatgaaattgcccagtattcttaacccaactgcacagaacaaaaacctgcaggaaacgaagataaatcatgtcgaaagctacatataaggaacgtgctgctactcatcctagtcctgttgctgccaagctatttaatatcatgcacgaaaagcaaacaaacttgtgtgcttcattggatgttcgtaccaccaaggaattactggagttagttgaagcattaggtcccaaaatttgtttactaaaaacacatgtggatatcttgactgatttttccatggagggcacagttaagccgctaaaggcattatccgccaagtacaattttttactcttcgaagacagaaaatttgctgacattggtaatacagtcaaattgcagtactctgcgggtgtatacagaatagcagaatgggcagacattacgaatgcacacggtgtggtgggcccaggtattgttagcggtttgaagcaggcggcagaagaagtaacaaaggaacctagaggccttttgatgttagcagaattgtcatgcaagggctccctatctactggagaatatactaagggtactgttgacattgcgaagagcgacaaagattttgttatcggctttattgctcaaagagacatgggtggaagagatgaaggttacgattggttgattatgacacccggtgtgggtttagatgacaagggagacgcattgggtcaacagtatagaaccgtggatgatgtggtctctacaggatctgacattattattgttggaagaggactatttgcaaagggaagggatgctaaggtagagggtgaacgttacagaaaagcaggctgggaagcatatttgagaagatgcggccagcaaaactaaaaaactgtattataagtaaatgcatgtatactaaactcacaaattagagcttcaatttaattatatcagttattacccaatcagatctgctgcattaatgaatcggccaacgcgcggggagaggcggtttgcgtattgggcgctcttccgcttcctcgctcactgactcgctgcgctcggtcgttcggctgcggcgagcggtatcagcatcgatgaattccacggactatagactatactagtatactccgtctactgtacgatacacttccgctcaggtccttgtcctttaacgaggccttaccactcttttgttactctattgatccagctcagcaaaggcagtgtgatctaagattctatcttcgcgatgtagtaaaactagctagaccgagaaagagactagaaatgcaaaaggcacttctacaatggctgccatcattattatccgatgtgacgctgcagcttctcaatgatattcgaatacgctttgaggagatacagcctaatatccgacaaactgttttacagatttacgatcgtatttgttacccatcattgaattttgaacatccgaacctgggagttttccctgaaacagatagtatatttgaacctgtataataatatatagtctagcgctttacggaagacaatgtatgtatttcggttcctggagaaactattgcatctattgcataggtaatcttgcacgtcgcatccccggttcattttctgcgtttccatcttgcacttcaatagcatatctttgttaacgaagcatctgtgcttcattttgtagaacaaaaatgcaacgcgagagcgctaatttttcaaacaaagaatctgagctgcatttttacagaacagaaatgcaacgcgaaagcgctattttaccaacgaagaatctgtgcttcatttttgtaaaacaaaaatgcaacgcgagagcgctaatttttcaaacaaagaatctgagctgcatttttacagaacagaaatgcaacgcgagagcgctattttaccaacaaagaatctatacttcttttttgttctacaaaaatgcatcccgagagcgctatttttctaacaaagcatcttagattactttttttctcctttgtgcgctctataatgcagtctcttgataactttttgcactgtaggtccgttaaggttagaagaaggctactttggtgtctattttctcttccataaaaaaagcctgactccacttcccgcgtttactgattactagcgaagctgcgggtgcattttttcaagataaaggcatccccgattatattctataccgatgtggattgcgcatactttgtgaacagaaagtgatagcgttgatgattcttcattggtcagaaaattatgaacggtttcttctattttgtctctatatactacgtataggaaatgtttacattttcgtattgttttcgattcactctatgaatagttcttactacaatttttttgtctaaagagtaatactagagataaacataaaaaatgtagaggtcgagtttagatgcaagttcaaggagcgaaaggtggatgggtaggttatatagggatatagcacagagatatatagcaaagagatacttttgagcaatgtttgtggaagcggtattcgcaatattttagtagctcgttacagtccggtgcgtttttggttttttgaaagtgcgtcttcagagcgcttttggttttcaaaagcgctctgaagttcctatactttctagagaataggaacttcggaataggaacttcaaagcgtttccgaaaacgagcgcttccgaaaatgcaacgcgagctgcgcacatacagctcactgttcacgtcgcacctatatctgcgtgttgcctgtatatatatatacatgagaagaacggcatagtgcgtgtttatgcttaaatgcgtacttatatgcgtctatttatgtaggatgaaaggtagtctagtacctcctgtgatattatcccattccatgcggggtatcgtatgcttccttcagcactaccctttagctgttctatatgctgccactcctcaattggattagtctcatccttcaatgctatcatttcctttgatattggatcatatgcatagtaccgagaaactagtgcgaagtagtgatcaggtattgctgttatctgatgagtatacgttgtcctggccacggcagaagcacgcttatcgctccaatttcccacaacattagtcaactccgttaggcccttcattgaaagaaatgaggtcatcaaatgtcttccaatgtgagattttgggccattttttatagcaaagattgaataaggcgcatttttcttcaaagctttattgtacgatctgactaagttatcttttaataattggtattcctgtttattgcttgaagaattgccggtcctatttactcgttttaggactggttcagaattcatcgatgctcactcaaaggcggtaatacggttatccacagaatcaggggataacgcaggaaagaacatgtgagcaaaaggccagcaaaaggccaggaaccgtaaaaaggccgcgttgctggcgtttttccataggctccgcccccctgacgagcatcacaaaaatcgacgctcaagtcagaggtggcgaaacccgacaggactataaagataccaggcgtttccccctggaagctccctcgtgcgctctcctgttccgaccctgccgcttaccggatacctgtccgcctttctcccttcgggaagcgtggcgctttctcatagctcacgctgtaggtatctcagttcggtgtaggtcgttcgctccaagctgggctgtgtgcacgaaccccccgttcagcccgaccgctgcgccttatccggtaactatcgtcttgagtccaacccggtaagacacgacttatcgccactggcagcagccactggtaacaggattagcagagcgaggtatgtaggcggtgctacagagttcttgaagtggtggcctaactacggctacactagaagaacagtatttggtatctgcgctctgctgaagccagttaccttcggaaaaagagttggtagctcttgatccggcaaacaaaccaccgctggtagcggtggtttttttgtttgcaagcagcagattacgcgcagaaaaaaaggatctcaagaagatcctttgatcttttctacggggtctgacgctcagtggaacgaaaactcacgttaagggattttggtcatgagattatcaaaaaggatcttcacctagatccttttaaattaaaaatgaagttttaaatcaatctaaagtatatatgagtaaacttggtctgacagttaccaatgcttaatcagtgaggcacctatctcagcgatctgtctatttcgttcatccatagttgcctgactccccgtcgtgtagataactacgatacgggagggcttaccatctggccccagtgctgcaatgataccgcgagacccacgctcaccggctccagatttatcagcaataaaccagccagccggaagggccgagcgcagaagtggtcctgcaactttatccgcctccatccagtctattaattgttgccgggaagctagagtaagtagttcgccagttaatagtttgcgcaacgttgttgccattgctacaggcatcgtggtgtcacgctcgtcgtttggtatggcttcattcagctccggttcccaacgatcaaggcgagttacatgatcccccatgttgtgcaaaaaagcggttagctccttcggtcctccgatcgttgtcagaagtaagttggccgcagtgttatcactcatggttatggcagcactgcataattctcttactgtcatgccatccgtaagatgcttttctgtgactggtgagtactcaaccaagtcattctgagaatagtgtatgcggcgaccgagttgctcttgcccggcgtcaatacgggataataccgcgccacatagcagaactttaaaagtgctcatcattggaaaacgttcttcggggcgaaaactctcaaggatcttaccgctgttgagatccagttcgatgtaacccactcgtgcacccaactgatcttcagcatcttttactttcaccagcgtttctgggtgagcaaaaacaggaaggcaaaatgccgcaaaaaagggaataagggcgacacggaaatgttgaatactcatactcttcctttttcaatattattgaagcatttatcagggttattgtctcatgagcggatacatatttgaatgtatttagaaaaataaacaaataggggttccgcgcacatttccccgaaaagtgccacctgacgtctaagaaaccattattatcatgacattaacctataaaaataggcgtatcacgaggccctttcgtctcgcgcgtttcggtgatgacggtgaaaacctctgacacatgcagctcccggagacggtcacagcttgtctgtaagcggatgccgggagcagacaagcccgtcagggcgcgtcagcgggtgttggcgggtgtcggggctggcttaactatgcggcatcagagcagattgtactgagagtgcaccatatgcggtgtgaaataccgcacagatgcgtaaggagaaaataccgcatcaggcgccattcgccattcaggctgcgcaactgttgggaagggcgatcggtgcgggcctcttcgctattacgccagctggcgaaagggggatgtgctgcaaggcgattaagttgggtaacgccagggttttcccagtcacgacgttgtaaaacgacggccagtgaattgcggccgcatcgatgg

SEQ ID NO: 35 - DNA, 11894 bp, Artificial Sequence
  source: /note="Description of Artificial Sequence: Synthetic polynucleotide"
  source: /note="RUNM001210_96.1 vector"
cgtacatttaattttcaacgtattctataagaaattgcgggagtttttttcatgtagatgatactgactgcacgcaaatataggcatgatttataggcatgatttgatggctgtaccgataggaacgctaagagtaacttcagaatcgttatcctggcggaaaaaattcatttgtaaactttaaaaaaaaaagccaatatccccaaaattattaagagcgcctccattattaactaaaatttcactcagcatccacaatgtatcaggtatctactacagatattacatgtggcgaaaaagacaagaacaatgcaatagcgcatcaagaaaaaacacaaagctttcaatcaatgaatcgaaaatgtcattaaaatagtatataaattgaaactaagtcataaagctataaaaagaaaatttatttaaatgcaagatttaaagtaaattcacgtatttaattggaacagatctaacaacaactctttcaactgtcaaacctggaccaaaaccaaataaaacaccccattcaaaaccgtcacctgtagtagatttaccctcttctaatgatctctttctcaattcatccataacgaacaaaacagtagatgaagacatgttaccatgttcagacaaaacatgtcttgaatcaacaaatttttctttcttcaaatccaatttttcttcaaccttatccaagattgctttaccacctggatgtgtaatccagaaaatagagttccaatctgagataccgattggagtaaaagcttcgatcaaacacttttcgatgttgttagagatcaacattggaacatctttatgcaaatcgaagatcaaaccagcttctctgatatgaccaccaattgtaccttcagaatttggcaaaattgtttgaccagttgaaactaattcgaagattggtctttcaccaactgattcatctggttctgcaccaacaataacagctgcagcaccgtcaccaaaaatagcttgaccaactaacaattccaaatcagaatctgatggacctctaaacaaacaagccatgatatcacaacaaactgccaagactctagcacccttattgttttctgcgatatccttagcgattctcaaaacagtaccaccaccgtaacaacctaattggtacatcataactctcttaacagatggtgacaaacccaacaactttgcacaatggtaatcagcacctggcatatctgtagtagatgctgatgtaaaaatcaaatgagtgatcttagactttggttgaccccattctttaattgctttagcacatgcatctttacccaactttggaacttcaacaaccaacatatcttgtctagcatccaatgtttgcatttcatgttcaactaatcttgggttttgcttcaaatgttcttcgttcaagaaacaatttctttttctaatcatagacttatcacagatctttctaaacttttccttcaattgtgtcatatgttctgacttagtaactctgaagtaataatctggaaattcatcttggatcaagatgttttctgggtttgcagtaccaatagccaaaactgatgctggaccttcagctctcaaatgattcatttatattgaattttcaaaaattcttactttttttttggatggacgcaaagaagtttaataatcatattacatggcattaccaccatatacatatccatatctaatcttacttatatgttgtggaaatgtaaagagccccattatcttagcctaaaaaaaccttctctttggaactttcagtaatacgcttaactgctcattgctatattgaagtacggattagaagccgccgagcgggcgacagccctccgacggaagactctcctccgtgcgtcctcgtcttcaccggtcgcgttcctgaaacgcagatgtgcctcgcgccgcactgctccgaacaataaagattctacaatactagcttttatggttatgaagaggaaaaattggcagtaacctggccccacaaaccttcaaattaacgaatcaaattaacaaccataggatgataatgcgattagttttttagccttatttctggggtaattaatcagcgaagcgatgatttttgatctattaacagatatataaatggaaaagctgcataaccactttaactaatactttcaacattttcagtttgtattacttcttattcaaatgtcataaaagtatcaacaaaaaattgttaatatacctctatactttaacgtcaaggagaaaaaactataatggctgttaagcatttgatcgttttgaagtttaaagatgaaattacagaagcacaaaaagaagaatttttcaagacttacgttaatttggttaacatcatcccagctatgaaggatgtttattggggtaaagatgttacacaaaagaaagaagaaggttacactcatatcgttgaagttacattcgaatctgttgaaactatccaagattacattattcatccagcacatgttggttttggtgacgtttacagatcattctgggaaaagttgttaatttttgattacactccaagaaaattaaaaccaaaaattgaattgaattgaaaacgatagatcaatttttttcttttctctttccccatcctttacgctaaaataatagtttattttattttttgaatattttttatttatatacgtatatatagactattatttatcttttaatgattattaagatttttattaaaaaaaaattcgctcctcttttaatgcctttatgcagtttttttttcccattcgatatttctatgttcgggttcagcgtattttaagtttaataactcgaaaattctgcgttcgttaaagctttcgagaaggatattatttcgaaataaaccgtgttgtgtaagcttgaagcctttttgcgctgccaatattcttatccatctattgtactctttagatccagtatagtgtattcttcctgctccaagctcatcccacttgcaacaaaaaaagtctaatcttctgcaataatttccatccttggcattcagagacatatattggtcaatcggttttaattttgtttcttcatcaagtttcctttaaagggatatataacagattctaaaactgacagaaatatttcgagtgaagaagaagcgttaaatattggatctttccgcagttctactctgatacatttttgaagtaggagagtcatttagaaggcgtattgctcaatagtagaaagcaggcctgtgcacatgaattaattaaaaaatataaaggtagtgattagacgacacatgtccataggtaacctgtcataattttgaacaatttcccttcttttcttttttttttttgggtgcggcgatatgtagcttgttaatttacacatcatgtacttttctgcatcaaaatatgaaaggcgatagtagctaaagaaaataccgagaatttcctcgaaaagttgacgacaaaagaaaggcataaaaaagtaatttgaaaatattttaaaactgttttaacccatctagcatccgcgctaaaaaaggaagatacaggatacagcggaaacaacttttaaatgggtaaaaattacaagtcattggattctgttgttgcatcagatttcattgctttgggtattacttctgaagttgcagaaacattgcatggtagattggctgaaatcgtttgtaactacggtgctgcaactccacaaacatggatcaacatcgcaaaccatatcttgtcaccagatttgccattttctttgcatcaaatgttgttttatggttgttacaaggatttcggtccagcaccaccagcttggattccagatccagaaaaggttaagtctactaatttgggtgctttgttggaaaagagaggtaaagaattcttgggtgttaagtacaaagatccaatctcttcattttcacattttcaagaattttctgttagaaacccagaagtttactggagaacagttttgatggatgaaatgaagatctcattttctaaagatccagaatgtatcttgagaagagatgatatcaacaatccaggtggttctgaatggttgccaggtggttatttgaattcagctaaaaattgtttgaacgttaactctaataagaaattgaacgatactatgatcgtttggagagatgagggtaacgatgatttgccattgaataagttgacattggatcaattgagaaaaagagtttggttggttggttacgcattagaagaaatgggtttggaaaaaggttgtgcaattgctattgatatgccaatgcatgttgatgctgttgttatatatttggcaatcgttttggctggttacgttgttgtttctattgcagattcattttctgctccagaaatctcaactagattgagattgtctaaggcaaaggctatttttacacaagatcatatcattagaggtaaaaagagaattccattgtactcaagagttgttgaagcaaagtctccaatggctatcgttatcccatgttcaggttctaacattggtgcagaattaagagatggtgacatttcatgggattactttttggaaagagctaaggaattcaaaaactgtgaattcactgcaagagaacaaccagttgatgcttacacaaacatcttgttttcttcaggtactacaggtgaaccaaaagcaattccatggactcaagctacaccattaaaagctgcagctgatggttggtcacatttggatattagaaaaggtgacgttattgtttggccaactaatttgggttggatgatgggtccatggttggtttatgcttcattgttgaacggtgcatctatcgctttgtacaacggttcaccattggtttctggtttcgcaaagttcgttcaagatgctaaggttacaatgttgggtgttgttccatcaatcgttagatcatggaagtctactaactgtgtttcaggttacgattggtctacaatcagatgtttctcttcatctggtgaagcatctaacgttgatgaatatttgtggttgatgggtagagctaactacaagccagttattgaaatgtgtggtggtactgaaattggtggtgcattttcagctggttcatttttgcaagctcaatctttgtcatctttttcatctcaatgtatgggttgtacattgtacatcttggataagaacggttacccaatgcctaaaaataagccaggtattggtgaattggcattaggtccagttatgttcggtgcttcaaagactttgttgaacggtaaccatcatgatgtttacttcaagggtatgccaacattgaatggtgaagttttgagaagacatggtgacatcttcgaattgacttctaacggttactaccatgcacatggtagagctgatgatacaatgaatattggtggtattaaaatctcatctatcgaaatcgaaagagtttgtaacgaagttgatgatagagtttttgaaactacagctattggtgttccaccattaggtggtggtccagaacaattggttattttctttgttttgaaagattcaaatgatactacaattgatttgaaccaattgagattgtcttttaatttgggtttacaaaagaaattgaacccattgtttaaagttactagagttgttccattgtcatctttgccaagaactgctacaaataagatcatgagaagagtcttgagacaacaattttctcattttgaaggagattgataagacttttctagttgcatatcttttatatttaaatcttatctattagttaattttttgtaatttatccttatatatagtctggttattctaaaatatcatttcagtatctaaaaattcccctcttttttcagttatatcttaacaggcgacagtccaaatgttgatttatcccagtccgattcatcagggttgtgaagcattttgtcaatggtcgaaatcacatcagtaatagtgcctcttacttgcctcatagaatttctttctcttaacgtcaccgtttggtcttttgaatttcatcattttttttttattcttttttttgatttcggtttccttgaaatttttttgattcggtaatctccgaacagaaggaagaacgaaggaaggagcacagacttagattggtatatatacgcatatgtagtgttgaagaaacatgaaattgcccagtattcttaacccaactgcacagaacaaaaacctgcaggaaacgaagataaatcatgtcgaaagctacatataaggaacgtgctgctactcatcctagtcctgttgctgccaagctatttaatatcatgcacgaaaagcaaacaaacttgtgtgcttcattggatgttcgtaccaccaaggaattactggagttagttgaagcattaggtcccaaaatttgtttactaaaaacacatgtggatatcttgactgatttttccatggagggcacagttaagccgctaaaggcattatccgccaagtacaattttttactcttcgaagacagaaaatttgctgacattggtaatacagtcaaattgcagtactctgcgggtgtatacagaatagcagaatgggcagacattacgaatgcacacggtgtggtgggcccaggtattgttagcggtttgaagcaggcggcagaagaagtaacaaaggaacctagaggccttttgatgttagcagaattgtcatgcaagggctccctatctactggagaatatactaagggtactgttgacattgcgaagagcgacaaagattttgttatcggctttattgctcaaagagacatgggtggaagagatgaaggttacgattggttgattatgacacccggtgtgggtttagatgacaagggagacgcattgggtcaacagtatagaaccgtggatgatgtggtctctacaggatctgacattattattgttggaagaggactatttgcaaagggaagggatgctaaggtagagggtgaacgttacagaaaagcaggctgggaagcatatttgagaagatgcggccagcaaaactaaaaaactgtattataagtaaatgcatgtatactaaactcacaaattagagcttcaatttaattatatcagttattacccaatcagatctgctgcattaatgaatcggccaacgcgcggggagaggcggtttgcgtattgggcgctcttccgcttcctcgctcactgactcgctgcgctcggtcgttcggctgcggcgagcggtatcagcatcgatgaattccacggactatagactatactagtatactccgtctactgtacgatacacttccgctcaggtccttgtcctttaacgaggccttaccactcttttgttactctattgatccagctcagcaaaggcagtgtgatctaagattctatcttcgcgatgtagtaaaactagctagaccgagaaagagactagaaatgcaaaaggcacttctacaatggctgccatcattattatccgatgtgacgctgcagcttctcaatgatattcgaatacgctttgaggagatacagcctaatatccgacaaactgttttacagatttacgatcgtatttgttacccatcattgaattttgaacatccgaacctgggagttttccctgaaacagatagtatatttgaacctgtataataatatatagtctagcgctttacggaagacaatgtatgtatttcggttcctggagaaactattgcatctattgcataggtaatcttgcacgtcgcatccccggttcattttctgcgtttccatcttgcacttcaatagcatatctttgttaacgaagcatctgtgcttcattttgtagaacaaaaatgcaacgcgagagcgctaatttttcaaacaaagaatctgagctgcatttttacagaacagaaatgcaacgcgaaagcgctattttaccaacgaagaatctgtgcttcatttttgtaaaacaaaaatgcaacgcgagagcgctaatttttcaaacaaagaatctgagctgcatttttacagaacagaaatgcaacgcgagagcgctattttaccaacaaagaatctatacttcttttttgttctacaaaaatgcatcccgagagcgctatttttctaacaaagcatcttagattactttttttctcctttgtgcgctctataatgcagtctcttgataactttttgcactgtaggtccgttaaggttagaagaaggctactttggtgtctattttctcttccataaaaaaagcctgactccacttcccgcgtttactgattactagcgaagctgcgggtgcattttttcaagataaaggcatccccgattatattctataccgatgtggattgcgcatactttgtgaacagaaagtgatagcgttgatgattcttcattggtcagaaaattatgaacggtttcttctattttgtctctatatactacgtataggaaatgtttacattttcgtattgttttcgattcactctatgaatagttcttactacaatttttttgtctaaagagtaatactagagataaacataaaaaatgtagaggtcgagtttagatgcaagttcaaggagcgaaaggtggatgggtaggttatatagggatatagcacagagatatatagcaaagagatacttttgagcaatgtttgtggaagcggtattcgcaatattttagtagctcgttacagtccggtgcgtttttggttttttgaaagtgcgtcttcagagcgcttttggttttcaaaagcgctctgaagttcctatactttctagagaataggaacttcggaataggaacttcaaagcgtttccgaaaacgagcgcttccgaaaatgcaacgcgagctgcgcacatacagctcactgttcacgtcgcacctatatctgcgtgttgcctgtatatatatatacatgagaagaacggcatagtgcgtgtttatgcttaaatgcgtacttatatgcgtctatttatgtaggatgaaaggtagtctagtacctcctgtgatattatcccattccatgcggggtatcgtatgcttccttcagcactaccctttagctgttctatatgctgccactcctcaattggattagtctcatccttcaatgctatcatttcctttgatattggatcatatgcatagtaccgagaaactagtgcgaagtagtgatcaggtattgctgttatctgatgagtatacgttgtcctggccacggcagaagcacgcttatcgctccaatttcccacaacattagtcaactccgttaggcccttcattgaaagaaatgaggtcatcaaatgtcttccaatgtgagattttgggccattttttatagcaaagattgaataaggcgcatttttcttcaaagctttattgtacgatctgactaagttatcttttaataattggtattcctgtttattgcttgaagaattgccggtcctatttactcgttttaggactggttcagaattcatcgatgctcactcaaaggcggtaatacggttatccacagaatcaggggataacgcaggaaagaacatgtgagcaaaaggccagcaaaaggccaggaaccgtaaaaaggccgcgttgctggcgtttttccataggctccgcccccctgacgagcatcacaaaaatcgacgctcaagtcagaggtggcgaaacccgacaggactataaagataccaggcgtttccccctggaagctccctcgtgcgctctcctgttccgaccctgccgcttaccggatacctgtccgcctttctcccttcgggaagcgtggcgctttctcatagctcacgctgtaggtatctcagttcggtgtaggtcgttcgctccaagctgggctgtgtgcacgaaccccccgttcagcccgaccgctgcgccttatccggtaactatcgtcttgagtccaacccggtaagacacgacttatcgccactggcagcagccactggtaacaggattagcagagcgaggtatgtaggcggtgctacagagttcttgaagtggtggcctaactacggctacactagaagaacagtatttggtatctgcgctctgctgaagccagttaccttcggaaaaagagttggtagctcttgatccggcaaacaaaccaccgctggtagcggtggtttttttgtttgcaagcagcagattacgcgcagaaaaaaaggatctcaagaagatcctttgatcttttctacggggtctgacgctcagtggaacgaaaactcacgttaagggattttggtcatgagattatcaaaaaggatcttcacctagatccttttaaattaaaaatgaagttttaaatcaatctaaagtatatatgagtaaacttggtctgacagttaccaatgcttaatcagtgaggcacctatctcagcgatctgtctatttcgttcatccatagttgcctgactccccgtcgtgtagataactacgatacgggagggcttaccatctggccccagtgctgcaatgataccgcgagacccacgctcaccggctccagatttatcagcaataaaccagccagccggaagggccgagcgcagaagtggtcctgcaactttatccgcctccatccagtctattaattgttgccgggaagctagagtaagtagttcgccagttaatagtttgcgcaacgttgttgccattgctacaggcatcgtggtgtcacgctcgtcgtttggtatggcttcattcagctccggttcccaacgatcaaggcgagttacatgatcccccatgttgtgcaaaaaagcggttagctccttcggtcctccgatcgttgtcagaagtaagttggccgcagtgttatcactcatggttatggcagcactgcataattctcttactgtcatgccatccgtaagatgcttttctgtgactggtgagtactcaaccaagtcattctgagaatagtgtatgcggcgaccgagttgctcttgcccggcgtcaatacgggataataccgcgccacatagcagaactttaaaagtgctcatcattggaaaacgttcttcggggcgaaaactctcaaggatcttaccgctgttgagatccagttcgatgtaacccactcgtgcacccaactgatcttcagcatcttttactttcaccagcgtttctgggtgagcaaaaacaggaaggcaaaatgccgcaaaaaagggaataagggcgacacggaaatgttgaatactcatactcttcctttttcaatattattgaagcatttatcagggttattgtctcatgagcggatacatatttgaatgtatttagaaaaataaacaaataggggttccgcgcacatttccccgaaaagtgccacctgacgtctaagaaaccattattatcatgacattaacctataaaaataggcgtatcacgaggccctttcgtctcgcgcgtttcggtgatgacggtgaaaacctctgacacatgcagctcccggagacggtcacagcttgtctgtaagcggatgccgggagcagacaagcccgtcagggcgcgtcagcgggtgttggcgggtgtcggggctggcttaactatgcggcatcagagcagattgtactgagagtgcaccatatgcggtgtgaaataccgcacagatgcgtaaggagaaaataccgcatcaggcgccattcgccattcaggctgcgcaactgttgggaagggcgatcggtgcgggcctcttcgctattacgccagctggcgaaagggggatgtgctgcaaggcgattaagttgggtaacgccagggttttcccagtcacgacgttgtaaaacgacggccagtgaattgcggccgcatcgatgg

SEQ ID NO: 36 - DNA, 10821 bp, Artificial Sequence
  source: /note="Description of Artificial Sequence: Synthetic polynucleotide"
  source: /note="bCBGA0409 vector"
gtggtggtgaggtggcaaaggtgggatggattgttcgtttctgaaaaagttgttagggtcggctttagtctttactttaactaatctgttgaaatttttaccaaagtacttttcaccccaaattcttgcttgtgtatagttatttggagattcagggttagttttacctaagtccaaatctctgtagttcaaatatgccaatcttgggttttgactaacgtaaggtgtagtgaagttgtaaacggatctgacccagttgatatgcttttcgttatcttcttgcttttcccatgaggctgtgtaccataattcatacatgataccagctctgtgaggaaatggtatggctgattcagatatttcttccataataccaccgtatggatacaaaacgtacatgccgacacctacatcttcttcgtacaacttttccaatatcttgaccattgcagtttcagggattggtttcttaacgtagtccaatttaatagaaaaagcggtctttttaccagcggatctatccaacaagatttcctttttgaagttagcggtgttgaagtttacaacacctgaatagaagatggttgtgtctatccaagaaaattccttgcaatctgtctttttaatacccaattctgggaatgacttattcatcaaatcaaccaaagaatctacaccaccatggaaaattgaagaaaaataaccgtgaacagtggtcttatttttaccatggttatctgtaatatttttagtgatgaaatgggtcatcaaaaccaagtccttatcgtacttgtaagcgatgttttgccacttattaaacaacttaaccaaaccgtggatttccatgttctttttgacagagaaaatagtacttttggaaggaacagcgactaacttaattttccaagcggcaatgataccgaaattttcaccaccaccacctcttatggcccaaaacaaatcttcacccatagactttctgtccaaaactttaccatctacgttaaccaaatgggcgtctataatattatctgcagctaaaccgtagtttctcatcaatgcaccataaccaccaccagaaaagtgaccaccgacacctactgttggacagtaaccaccagggaaagaaaagttttcattcttttcgttgatccagtagtaaacttcacccaaggtggcacctgcttctacccatgctgtttgactgtgaacgtcgatctttatggaatgcatatttctcaaatcgactacaacgaatggaacttgtgagatgtaagacatgccttctgcatcatgaccacctgatctagttctgatttgcaaacctactttcttagagcacaatatagaagcttgaatgtgactaacattggaaggtgtaacaatgactaaaggttttggtgtagtgtcagaagtgaatctcaaattttggatggtactgttcaaaacggacatgtacaattgatcatgttgagtatatataaactttgggttagcagggttgtttgggatgtattcggagaaacacttcaaaaagttttcttgtggatttgcgatggagatttggatgttgaaggacaagaagaagaagattattttacagacgaaccagaaagagaatgcggagcagttcatttatattgaattttcaaaaattcttactttttttttggatggacgcaaagaagtttaataatcatattacatggcattaccaccatatacatatccatatctaatcttacttatatgttgtggaaatgtaaagagccccattatcttagcctaaaaaaaccttctctttggaactttcagtaatacgcttaactgctcattgctatattgaagtacggattagaagccgccgagcgggcgacagccctccgacggaagactctcctccgtgcgtcctcgtcttcaccggtcgcgttcctgaaacgcagatgtgcctcgcgccgcactgctccgaacaataaagattctacaatactagcttttatggttatgaagaggaaaaattggcagtaacctggccccacaaaccttcaaattaacgaatcaaattaacaaccataggatgataatgcgattagttttttagccttatttctggggtaattaatcagcgaagcgatgatttttgatctattaacagatatataaatggaaaagctgcataaccactttaactaatactttcaacattttcagtttgtattacttcttattcaaatgtcataaaagtatcaacaaaaaattgttaatatacctctatactttaacgtcaaggagaaaaaactataatgggtttatctttggtctgtactttttcatttcaaactaattaccatacattgttaaatccacataataagaaccctaaaaattctttgttgtcatatcaacatccaaaaactccaattattaaatcttcttatgataattttccatctaagtactgtttgactaaaaatttccatttgttaggtttaaattctcataatagaatttcttcacaatcaagatcaattagagctggttctgatcaaattgaaggttcaccacatcatgaatctgataactcaatcgcaactaaaattttgaactttggtcatacatgttggaaattgcaaagaccatacgttgttaagggtatgatttctattgcttgtggtttatttggtagagaattgtttaataacagacatttgttttcttggggtttgatgtggaaagcatttttcgcattagttccaatcttgtcttttaatttctttgctgcaatcatgaaccaaatatatgatgttgatattgatagaattaataagccagatttgccattggtttctggtgaaatgtcaatcgaaactgcttggattttatctatcatcgttgcattgactggtttgatcgttacaattaaattaaaatcagctccattgttcgtttttatatatatcttcggtatcttcgctggttttgcatactctgttccaccaattagatggaagcaatacccttttactaatttcttgatcacaatttcttcacatgttggtttggcttttacttcttactcagctactacatctgcattaggtttgccatttgtttggaggccagctttttcttttattatcgcttttatgactgttatgggtatgacaatcgctttcgcaaaggatatctctgatattgaaggtgacgctaaatacggtgtttcaactgttgctacaaaattgggtgcaagaaacatgactttcgttgtttctggtgttttgttgttgaactatttggtttctatctcaatcggtattatttggccacaagtttttaaatctaacatcatgatcttgtcacatgctatcttggcattctgtttgatcttccaaacaagagaattagctttggcaaattatgcttctgcaccatcaagacaatttttcgagtttatttggttgttgtactacgctgaatattttgtttacgtttttatttgagattaatataattatataaaaatattatcttcttttctttatatctagtgttatgtaaaataaattgatgactacggaaagcttttttatattgtttctttttcattctgagccacttaaatttcgtgaatgttcttgtaagggacggtagatttacaagtgatacaacaaaaagcaaggcgctttttctaataaaaagaagaaaagcatttaacaattgaacacctctatatcaacgaagaatattactttgtctctaaatccttgtaaaatgtgtacgatctctatatgggttactcataagtgtaccgaagactgcattgaaagtttatgttttttcactggaggcgtcattttcgcgttgagaacaattgtcctgtacttccttgttcatgtgtgttcaaaaacgttatatttataggataattatactctatttctcaacaagtaattggttgtttggccgagcggtctaaggcgcctgattcaagaaatatcttgaccgcagttaactgtgggaatactcaggtatcgtaagatgcaagagttcgaatctcttagcaaccattatttttttcctcaacataacgagaacacacaggggcgctatcgcacagaatcaaattcgatgactggaaattttttgttaatttcagaggtcgcctgacgcatatacctttttcaactgaaaaattgggagaaaaaggaaaggtgagagcgccggaaccggcttttcatatagaatagagaagcgttcatgactaaatgcttgcatcacaatacttgaagttgacaatattatttaaggacctattgttttttccaataggtggttagcaatcgtcttactttctaacttttcttaccttttacatttcagcaatatatatatatatttcaaggatataccattctaatgtctgcccctaagaagatcgtcgttttgccaggtgaccacgttggtcaagaaatcacagccgaagccattaaggttcttaaagctatttctgatgttcgttccaatgtcaagttcgatttcgaaaatcatttaattggtggtgctgctatcgatgctacaggtgttccacttccagatgaggcgctggaagcctccaagaaggctgatgccgttttgttaggtgctgtgggtggtcctaaatggggtaccggtagtgttagacctgaacaaggtttactaaaaatccgtaaagaacttcaattgtacgccaacttaagaccatgtaactttgcatccgactctcttttagacttatctccaatcaagccacaatttgctaaaaatactgacttcgttgttgtcagagaattagtgggaggtatttactttggtaagagaaaggaagacgatggtgatggtgtcgcttgggatagtgaacaatacaccgttccagaagtgcaaagaatcacaagaatggccgctttcatggccctacaacatgagccaccattgcctatttggtccttggataaagctaatgttttggcctcttcaagattatggagaaaaactgtggaggaaaccatcaagaacgaattccctacattgaaggttcaacatcaattgattgattctgccgccatgatcctagttaagaacccaacccacctaaatggtattataatcaccagcaacatgtttggtgatatcatctccgatgaagcctccgttatcccaggttccttgggtttgttgccatctgcgtccttggcctctttgccagacaagaacaccgcatttggtttgtacgaaccatgccacggttctgctccagatttgccaaagaataaggtcaaccctatcgccactatcttgtctgctgcaatgatgttgaaattgtcattgaacttgcctgaagaaggtaaggccattgaagatgcagttaaaaaggttttggatgcaggtatcagaactggtgatttaggtggttccaacagtaccaccgaagtcggtgatgctgtcgccgaagaagttaagaaaatccttgcttaaaaagattctctttttttatgatatttgtacataaactttataaatgaaattcataatagaaacgacacgaaattacaaaatggaatatgttcatagggtagacgaaactatatacgcaatctacatacatttatcaagaaggagaaaaaggaggatgtaaaggaatacaggtaagcaaattgatactaatggctcaacgtgataaggaaaaagaattgcactttaacattaatattgacaaggaggagggcaccacacaaaaagttacagatctgctgcattaatgaatcggccaacgcgcggggagaggcggtttgcgtattgggcgctcttccgcttcctcgctcactgactcgctgcgctcggtcgttcggctgcggcgagcggtatcagcatcgatgaattccacggactatagactatactagtatactccgtctactgtacgatacacttccgctcaggtccttgtcctttaacgaggccttaccactcttttgttactctattgatccagctcagcaaaggcagtgtgatctaagattctatcttcgcgatgtagtaaaactagctagaccgagaaagagactagaaatgcaaaaggcacttctacaatggctgccatcattattatccgatgtgacgctgcagcttctcaatgatattcgaatacgctttgaggagatacagcctaatatccgacaaactgttttacagatttacgatcgtatttgttacccatcattgaattttgaacatccgaacctgggagttttccctgaaacagatagtatatttgaacctgtataataatatatagtctagcgctttacggaagacaatgtatgtatttcggttcctggagaaactattgcatctattgcataggtaatcttgcacgtcgcatccccggttcattttctgcgtttccatcttgcacttcaatagcatatctttgttaacgaagcatctgtgcttcattttgtagaacaaaaatgcaacgcgagagcgctaatttttcaaacaaagaatctgagctgcatttttacagaacagaaatgcaacgcgaaagcgctattttaccaacgaagaatctgtgcttcatttttgtaaaacaaaaatgcaacgcgagagcgctaatttttcaaacaaagaatctgagctgcatttttacagaacagaaatgcaacgcgagagcgctattttaccaacaaagaatctatacttcttttttgttctacaaaaatgcatcccgagagcgctatttttctaacaaagcatcttagattactttttttctcctttgtgcgctctataatgcagtctcttgataactttttgcactgtaggtccgttaaggttagaagaaggctactttggtgtctattttctcttccataaaaaaagcctgactccacttcccgcgtttactgattactagcgaagctgcgggtgcattttttcaagataaaggcatccccgattatattctataccgatgtggattgcgcatactttgtgaacagaaagtgatagcgttgatgattcttcattggtcagaaaattatgaacggtttcttctattttgtctctatatactacgtataggaaatgtttacattttcgtattgttttcgattcactctatgaatagttcttactacaatttttttgtctaaagagtaatactagagataaacataaaaaatgtagaggtcgagtttagatgcaagttcaaggagcgaaaggtggatgggtaggttatatagggatatagcacagagatatatagcaaagagatacttttgagcaatgtttgtggaagcggtattcgcaatattttagtagctcgttacagtccggtgcgtttttggttttttgaaagtgcgtcttcagagcgcttttggttttcaaaagcgctctgaagttcctatactttctagagaataggaacttcggaataggaacttcaaagcgtttccgaaaacgagcgcttccgaaaatgcaacgcgagctgcgcacatacagctcactgttcacgtcgcacctatatctgcgtgttgcctgtatatatatatacatgagaagaacggcatagtgcgtgtttatgcttaaatgcgtacttatatgcgtctatttatgtaggatgaaaggtagtctagtacctcctgtgatattatcccattccatgcggggtatcgtatgcttccttcagcactaccctttagctgttctatatgctgccactcctcaattggattagtctcatccttcaatgctatcatttcctttgatattggatcatatgcatagtaccgagaaactagtgcgaagtagtgatcaggtattgctgttatctgatgagtatacgttgtcctggccacggcagaagcacgcttatcgctccaatttcccacaacattagtcaactccgttaggcccttcattgaaagaaatgaggtcatcaaatgtcttccaatgtgagattttgggccattttttatagcaaagattgaataaggcgcatttttcttcaaagctttattgtacgatctgactaagttatcttttaataattggtattcctgtttattgcttgaagaattgccggtcctatttactcgttttaggactggttcagaattcatcgatgctcactcaaaggcggtaatacggttatccacagaatcaggggataacgcaggaaagaacatgtgagcaaaaggccagcaaaaggccaggaaccgtaaaaaggccgcgttgctggcgtttttccataggctccgcccccctgacgagcatcacaaaaatcgacgctcaagtcagaggtggcgaaacccgacaggactataaagataccaggcgtttccccctggaagctccctcgtgcgctctcctgttccgaccctgccgcttaccggatacctgtccgcctttctcccttcgggaagcgtggcgctttctcatagctcacgctgtaggtatctcagttcggtgtaggtcgttcgctccaagctgggctgtgtgcacgaaccccccgttcagcccgaccgctgcgccttatccggtaactatcgtcttgagtccaacccggtaagacacgacttatcgccactggcagcagccactggtaacaggattagcagagcgaggtatgtaggcggtgctacagagttcttgaagtggtggcctaactacggctacactagaagaacagtatttggtatctgcgctctgctgaagccagttaccttcggaaaaagagttggtagctcttgatccggcaaacaaaccaccgctggtagcggtggtttttttgtttgcaagcagcagattacgcgcagaaaaaaaggatctcaagaagatcctttgatcttttctacggggtctgacgctcagtggaacgaaaactcacgttaagggattttggtcatgagattatcaaaaaggatcttcacctagatccttttaaattaaaaatgaagttttaaatcaatctaaagtatatatgagtaaacttggtctgacagttaccaatgcttaatcagtgaggcacctatctcagcgatctgtctatttcgttcatccatagttgcctgactccccgtcgtgtagataactacgatacgggagggcttaccatctggccccagtgctgcaatgataccgcgagacccacgctcaccggctccagatttatcagcaataaaccagccagccggaagggccgagcgcagaagtggtcctgcaactttatccgcctccatccagtctattaattgttgccgggaagctagagtaagtagttcgccagttaatagtttgcgcaacgttgttgccattgctacaggcatcgtggtgtcacgctcgtcgtttggtatggcttcattcagctccggttcccaacgatcaaggcgagttacatgatcccccatgttgtgcaaaaaagcggttagctccttcggtcctccgatcgttgtcagaagtaagttggccgcagtgttatcactcatggttatggcagcactgcataattctcttactgtcatgccatccgtaagatgcttttctgtgactggtgagtactcaaccaagtcattctgagaatagtgtatgcggcgaccgagttgctcttgcccggcgtcaatacgggataataccgcgccacatagcagaactttaaaagtgctcatcattggaaaacgttcttcggggcgaaaactctcaaggatcttaccgctgttgagatccagttcgatgtaacccactcgtgcacccaactgatcttcagcatcttttactttcaccagcgtttctgggtgagcaaaaacaggaaggcaaaatgccgcaaaaaagggaataagggcgacacggaaatgttgaatactcatactcttcctttttcaatattattgaagcatttatcagggttattgtctcatgagcggatacatatttgaatgtatttagaaaaataaacaaataggggttccgcgcacatttccccgaaaagtgccacctgacgtctaagaaaccattattatcatgacattaacctataaaaataggcgtatcacgaggccctttcgtctcgcgcgtttcggtgatgacggtgaaaacctctgacacatgcagctcccggagacggtcacagcttgtctgtaagcggatgccgggagcagacaagcccgtcagggcgcgtcagcgggtgttggcgggtgtcggggctggcttaactatgcggcatcagagcagattgtactgagagtgcaccatatgcggtgtggaataccgcacagatgcgtaaggagaaaataccgcatcaggcgccattcgccattcaggctgcgcaactgttgggaagggcgatcggtgcgggcctcttcgctattacgccagctggcgaaagggggatgtgctgcaaggcgattaagttgggtaacgccagggttttcccagtcacgacgttgtaaaacgacggccagtgaattgcggccgcatcgatggaaaagaccaaacggtgacgttaagagaaagaaattctatgaggcaagtaagaggcactattactgatgtgatttcgaccattgacaaaatgcttcacaaccctgatgaatcggactgggataaatcaacatttggactgtcgcctgttaagatataactgaaaaaagaggggaatttttagatactgaaatgatattttagaataaccagactatatataaggataaattacaaaaaattaactaatagataagatttaaatataaaagatatgcaactagaaaagtcttatcaatctcctta

SEQ ID NO: 37 - DNA, 951 bp, Artificial Sequence
  source: /note="Description of Artificial Sequence: Synthetic polynucleotide"
  source: /note="Truncated Prenyltransferase"
attgaaggttcaccacatcatgaatctgataactcaatcgcaactaaaattttgaactttggtcatacatgttggaaattgcaaagaccatacgttgttaagggtatgatttctattgcttgtggtttatttggtagagaattgtttaataacagacatttgttttcttggggtttgatgtggaaagcatttttcgcattagttccaatcttgtcttttaatttctttgctgcaatcatgaaccaaatatatgatgttgatattgatagaattaataagccagatttgccattggtttctggtgaaatgtcaatcgaaactgcttggattttatctatcatcgttgcattgactggtttgatcgttacaattaaattaaaatcagctccattgttcgtttttatatatatcttcggtatcttcgctggttttgcatactctgttccaccaattagatggaagcaatacccttttactaatttcttgatcacaatttcttcacatgttggtttggcttttacttcttactcagctactacatctgcattaggtttgccatttgtttggaggccagctttttcttttattatcgcttttatgactgttatgggtatgacaatcgctttcgcaaaggatatctctgatattgaaggtgacgctaaatacggtgtttcaactgttgctacaaaattgggtgcaagaaacatgactttcgttgtttctggtgttttgttgttgaactatttggtttctatctcaatcggtattatttggccacaagtttttaaatctaacatcatgatcttgtcacatgctatcttggcattctgtttgatcttccaaacaagagaattagctttggcaaattatgcttctgcaccatcaagacaatttttcgagtttatttggttgttgtactacgctgaatattttgtttacgtttttatttga

SEQ ID NO: 38 - protein, 316 aa, Artificial Sequence
  source: /note="Description of Artificial Sequence: Synthetic polypeptide"
  source: /note="Truncated Prenyltransferase"
IEGSPHHESDNSIATKILNFGHTCWKLQRPYVVKGMISIACGLFGRELFNNRHLFSWGLMWKAFFALVPILSFNFFAAIMNQIYDVDIDRINKPDLPLVSGEMSIETAWILSIIVALTGLIVTIKLKSAPLFVFIYIFGIFAGFAYSVPPIRWKQYPFTNFLITISSHVGLAFTSYSATTSALGLPFVWRPAFSFIIAFMTVMGMTIAFAKDISDIEGDAKYGVSTVATKLGARNMTFVVSGVLLLNYLVSISIGIIWPQVFKSNIMILSHAILAFCLIFQTRELALANYASAPSRQFFEFIWLLYYAEYFVYVFI

SEQ ID NO: 39 - DNA, 4247 bp, Saccharomyces cerevisiae
  modified_base (836)..(837): a, c, g, or t
tcactcaaccatctccaaaaaataacaggttcatctaaagtaaaagactttaacttgctcttagtttccaaattaaatatctgcacgatagtaccatttgctctaacggaaataaccatctgagatggatgcatgatagcagaatcaccgcccatattcttccttgtcacttcattgcctttggccaaatccacgattgcaacagagtttgtaccgtcctttgtttctctaacagtgacgaagtggtcactctcgaaagtagttgatctgaagtcaaggaattgaggggaaattcctaaggacgtcagatcgaccaattcggtaaattcaatgggtaggtcactcattggttagaactttcgtgataatttatttttatagttgaatatcttctttctctctcaactctgatccggattgtcgaggtttcaataagttactctgaacaactaatcaaaatatctccttatttctgtagattccttcagttccactttttgcttttcttaattctctttgtatttattcctagcgacgaaaaatgcgagatctcgaccaaaaaaagggggtagggtaataaaattarccctattatttttgaactttaaaacctataatgtgctaatattttattatacacctcctttttttgtgtttaaaccctgacacattttaagccctatatttacggtattagttgattaaactccgaagcgaaaggaattcggtcattagcggctaatagccgttggggtaaatcacctacaagcaagtacacaagagaacgttggcgttgttaagtcaaagcactaatacattggggctttaagagtgtnnataaaggtctgacctgtaaaaattatttaaacaacttgaacaggccttaaagttttcctcattccgctcatcatcactaatattgctctccgtttttgaatacacacttgacactaataagtatcacagaaaaaaagaaaatataataaattagtattgcgatatgacgagacgtactactattaatcccgattcggtggttctgaatcctcaaaaatttatccagaaagaaagggcggattccaaaatcaaagttgaccaagttaacacatttttagagtcatccccggagaggagaactctgacgcacgccttaatagaccaaatagtgaatgatcctatattgaagactgacacggactattacgatgctacaaaactgcaagagagagaaattactgccaaaaaaatagctaggcttgctagttatatggagcacgatatcaaaacagtgcgcaaacactttcgcaacactgacctgatgaaagagttgcaagcaaatgatccagacaaagcttcgcctttaacaaacaaagacctttttatattcgataagagattatcacttgtagcaaatattgatcctcaattgggtacgcgcgtgggtgtacacttggggctatttggtaattgtatcaagggcaatggtactgatgagcaaatccggtattggttgcaggagagaggtgccactttgatgaaaggtatatatggctgttttgcaatgactgagttaggacatggttccaatgttgcccagctgcagactagggctgtgtacgataagcaaaatgatacttttataattgatacacctgatctaactgccaccaaatggtggattggtggggctgcccattctgccacgcacgctgccgtgtacgccagattgatcgttgaaggtaaagactacggtgtaaaaacattcgttgttcctctgagagacccttcgactttccaactgttagctggtgtttccataggggatattggagcgaagatgggtcgtgacggtattgataatggctggatccagttcagaaacgtagttatccctagagaatttatgctaagtagatttaccaaagttgtccgttctccagatggttcagtcaccgtcaaaactgagccacaattggatcaaatttctggttatagtgcattgttaagtggtagagttaacatggtcatggattcatttaggtttggctccaaatttgctactattgctgtacgttacgcggttggtcgtcagcaattcgcacctagaaagggattgtctgaaacacaattaatcgactatccccttcaccaatatcgtgttttaccacaattgtgtgttccatatttggtgtcacctgtagcttttaagttaatggacaactattattccactttggacgagttatacaacgcttcctcatctgcagacaaagctgctctggttaccgtgagtaaaaagttgaagaatttatttattgatagcgccagcttgaaagccaccaatacttggttaattgctacactgattgatgagttgagacagacttgcggaggacatgggtattcacagtataacggatttggtaaaggctatgacgactgggtggttcagtgcacatgggagggtgataataatgttttatctttaacttcagcaaaatcaatattgaaaaaatttatcgattcagccacaaagggtagatttgacaacacactggatgtggactcattctcttacttaaaacctcagtacataggatctgtggtttctggagaaacaaagagtagtttaaaggagttgggtgattatactgaaatttggtctatcaccttaatcaaattattggcacatattggtactttagttgaaaaatcaagaagtattgatagcgtttctaagcttttagtcttagtatccaaatttcatgccttgcgctgcatgttgaaaacctattacgacaagttaaactctcgcgattcacatatttccgatgaaattacaaaggaatcaatgtggaatgtttataagttattttccttgtattttattgacaagcattccggagaattccaacaattcaagattttcactcctgatcagatctctaaagttgtgcagccacaactattggctcttttkccaattgtgaggaaagactgtataggtgtgacagactcctttgaattacctgacgcgatgttaaattctcctataggttactttgatggcgatatctatcacaattacttcaatgaagtttgccgcaataatccagtggaggcagatggggcagggaagccttcttatcatgcgctgttgagcagcatgctcggtagaggtttcgaatttgaccaaaagttaggtggtgcagctaatgcggaaattttatcgaaaataaacaagtgagtagaggtttcctgttttccttcgaaccctctgttttgcgacttttgtttcaattcaactagtgtcgccaagttttaacaaaaagttacaaaatcctagtgagaggccatcttttgtgcataacggtactctctatctatttacatatctaatactattcacataactatgacgaatcaatgacatgactacatttaccaatgtatagtagtaaaaaawttgccatctcctagaatcgaaccagggtttcatcggccacaacgatgtgtactaaccactatactaagatggcaggtaattattgagtgtttactcaatatctcagaattatatacgtaacaaataataaatgtgctgtgttggcacttgttggaatgaagctctaaaatatcatgatgattgtgtggattctgatgtaattgttgggattccatttttaataaggcaatatgttggaacgagagtaattaatagtgacatgagttgctatggtaacaatctaatgcttacatcgtatattaatgtacacatcgtatacgtttaagtgtgattgcgcctattgcagaaggaatgttaaacgagaagctcagacaatactgaagctgtgttaaagacctattagctgaacatgatatggtaggtacatatatgaggaatatgagtcgtcacatcaatgtatagtaactaccggaatcactattatattggtcatgattaatatgaccaatcggcgtgtgttttatatacctctcttatttagtataagaagatcagtactcacttcttcattaatactaatttttaacctctaattatcaacacaataatattaggtatgtagatatactagaagttctcctccaggatttaggaatccataaaagggagtctgcaattctacacaattctataaatattatcatcatcgttttatatgttaatattcattgatcctattacattatcaatccttgcgtttcagcttccactaatttagatg

SEQ ID NO: 40 - protein, 385 aa, Unknown; identical to SEQ ID NO: 5
  source: /note="Description of Unknown: TKS sequence"

SEQ ID NO: 41 - DNA, 1158 bp, Unknown
  source: /note="Description of Unknown: TKS sequence"
atgaatcatttgagagctgaaggtccagcatcagttttggctattggtactgcaaacccagaaaacatcttgatccaagatgaatttccagattattacttcagagttactaagtcagaacatatgacacaattgaaggaaaagtttagaaagatctgtgataagtctatgattagaaaaagaaattgtttcttgaacgaagaacatttgaagcaaaacccaagattagttgaacatgaaatgcaaacattggatgctagacaagatatgttggttgttgaagttccaaagttgggtaaagatgcatgtgctaaagcaattaaagaatggggtcaaccaaagtctaagatcactcatttgatttttacatcagcatctactacagatatgccaggtgctgattaccattgtgcaaagttgttgggtttgtcaccatctgttaagagagttatgatgtaccaattaggttgttacggtggtggtactgttttgagaatcgctaaggatatcgcagaaaacaataagggtgctagagtcttggcagtttgttgtgatatcatggcttgtttgtttagaggtccatcagattctgatttggaattgttagttggtcaagctatttttggtgacggtgctgcagctgttattgttggtgcagaaccagatgaatcagttggtgaaagaccaatcttcgaattagtttcaactggtcaaacaattttgccaaattctgaaggtacaattggtggtcatatcagagaagctggtttgatcttcgatttgcataaagatgttccaatgttgatctctaacaacatcgaaaagtgtttgatcgaagcttttactccaatcggtatctcagattggaactctattttctggattacacatccaggtggtaaagcaatcttggataaggttgaagaaaaattggatttgaagaaagaaaaatttgttgattcaagacatgttttgtctgaacatggtaacatgtcttcatctactgttttgttcgttatggatgaattgagaaagagatcattagaagagggtaaatctactacaggtgacggttttgaatggggtgttttatttggttttggtccaggtttgacagttgaaagagttgttgttagatctgttccaattaaatactaa

SEQ ID NO: 42 - DNA, 1635 bp, Unknown
  source: /note="Description of Unknown: CBDA synthase sequence"
atgaaatgttctacattttcattttggtttgtttgtaagatcattttctttttcttttcttttaatattcaaacttcaatcgctaacccaagagaaaatttcttgaagtgtttctctcaatacattccaaataatgcaacaaatttgaaattggtttatactcaaaataatccattatacatgtctgttttaaattctacaattcataatttgagattttcttcagatactacaccaaaaccattggttattgttacaccatctcatgtttcacatatccaaggtactatcttgtgttctaagaaagttggtttgcaaattagaactagatcaggtggtcatgattcagaaggcatgtcttacatctcacaagttccattcgttatcgttgatttgagaaacatgagatcaattaaaattgatgttcattcacaaacagcttgggttgaagctggtgcaactttgggtgaagtttactactgggttaacgaaaagaatgaatctttatcattggctgctggttactgtccaacagtttgtgctggtggtcattttggtggtggtggttatggtccattaatgagatcctatggtttggctgctgataacatcatcgatgcacatttggttaacgttcatggtaaagttttggatagaaagtctatgggtgaagatttgttttgggctttgagaggtggtggtgctgaatcatttggtatcatcgttgcttggaagatcagattggttgcagttccaaaatctactatgttctcagttaagaaaattatggaaatccatgaattagttaaattggttaataagtggcaaaatattgcttataaatacgataaagatttgttattgatgactcattttattacaagaaatattactgataaccaaggtaaaaataagacagctatccatacttacttttcttcagttttcttgggtggtgttgattctttggttgatttgatgaataagtcttttccagaattaggtattaagaaaactgattgtagacaattgtcttggatcgatactatcattttctattcaggtgttgttaactacgatacagataacttcaataaggaaattttattggatagatcagctggtcaaaatggtgcttttaaaattaaattggattacgttaagaaaccaattccagaatcagttttcgttcaaattttagaaaaattgtatgaagaagatattggtgctggcatgtacgcattgtatccatacggtggtatcatggatgaaatttctgaatcagctattccatttccacatagagcaggtattttatacgaattgtggtacatttgttcttgggaaaagcaagaagataacgaaaaacatttgaactggattagaaacatctataacttcatgactccatacgtttcacaaaacccaagattggcttatttgaactacagagatttggatatcggtattaatgatcctaaaaatccaaacaactatacacaagcaagaatttggggtgaaaagtacttcggtaaaaatttcgatagattggttaaggttaaaactttggttgatccaaataatttctttagaaatgaacaatctattccaccattgccaagacatagacattga

SEQ ID NO: 43 - protein, 544 aa, Unknown
  source: /note="Description of Unknown: CBDA synthase sequence"
MKCSTFSFWFVCKIIFFFFSFNIQTSIANPRENFLKCFSQYIPNNATNLKLVYTQNNPLYMSVLNSTIHNLRFSSDTTPKPLVIVTPSHVSHIQGTILCSKKVGLQIRTRSGGHDSEGMSYISQVPFVIVDLRNMRSIKIDVHSQTAWVEAGATLGEVYYWVNEKNESLSLAAGYCPTVCAGGHFGGGGYGPLMRSYGLAADNIIDAHLVNVHGKVLDRKSMGEDLFWALRGGGAESFGIIVAWKIRLVAVPKSTMFSVKKIMEIHELVKLVNKWQNIAYKYDKDLLLMTHFITRNITDNQGKNKTAIHTYFSSVFLGGVDSLVDLMNKSFPELGIKKTDCRQLSWIDTIIFYSGVVNYDTDNFNKEILLDRSAGQNGAFKIKLDYVKKPIPESVFVQILEKLYEEDIGAGMYALYPYGGIMDEISESAIPFPHRAGILYELWYICSWEKQEDNEKHLNWIRNIYNFMTPYVSQNPRLAYLNYRDLDIGINDPKNPNNYTQARIWGEKYFGKNFDRLVKVKTLVDPNNFFRNEQSIPPLPRHRH

SEQ ID NO: 44 - protein, 92 aa, Artificial Sequence
  source: /note="Description of Artificial Sequence: Synthetic polypeptide"
MRQVWFSWIVGLFLCFFNVSSAAPVNTTTEDETAQIPAEAVIGYLDLEGDFDVAVLPFSNSTNNGLLFINTTIASIAAKEEGVSLDKREAEA

SEQ ID NO: 45 - protein, 89 aa, Artificial Sequence
  source: /note="Description of Artificial Sequence: Synthetic polypeptide"
MRFPSIFTAVLFAASSALAAPVNTTTEDETAQIPAEAVIGYLDLEGDFDVAVLPFSNSTNNGLLFINTTIASIAAKEEGVSLDKREAEA

SEQ ID NO: 46 - protein, 21 aa, Artificial Sequence
  source: /note="Description of Artificial Sequence: Synthetic peptide"
MQRPFLLAYLVLSLLFNSALG

SEQ ID NO: 47 - protein, 23 aa, Artificial Sequence
  source: /note="Description of Artificial Sequence: Synthetic peptide"
MRFSTTLATAATALFFTASQVSA

SEQ ID NO: 48 - protein, 22 aa, Artificial Sequence
  source: /note="Description of Artificial Sequence: Synthetic peptide"
MRQVWFSWIVGLFLCFFNVSSA

SEQ ID NO: 49 - protein, 19 aa, Artificial Sequence
  source: /note="Description of Artificial Sequence: Synthetic peptide"
MLLQAFLFLLAGFAAKISA

SEQ ID NO: 50 - protein, 87 aa, Artificial Sequence
  source: /note="Description of Artificial Sequence: Synthetic polypeptide"
MFKSVVYSILAASLANAAPVNTTTEDETAQIPAEAVIGYLDLEGDFDVAVLPFSNSTNNGLLFINTTIASIAAKEEGVSLDKREAEA

SEQ ID NO: 51 - protein, 88 aa, Artificial Sequence
  source: /note="Description of Artificial Sequence: Synthetic polypeptide"
MQLLRCFSIFSVIASVLAAPVNTTTEDETAQIPAEAVIGYLDLEGDFDVAVLPFSNSTNNGLLFINTTIASIAAKEEGVSLDKREAEA

SEQ ID NO: 52 - protein, 91 aa, Artificial Sequence
  source: /note="Description of Artificial Sequence: Synthetic polypeptide"
MQRPFLLAYLVLSLLFNSALGAPVNTTTEDETAQIPAEAVIGYLDLEGDFDVAVLPFSNSTNNGLLFINTTIASIAAKEEGVSLDKREAEA

SEQ ID NO: 53 - protein, 93 aa, Artificial Sequence
  source: /note="Description of Artificial Sequence: Synthetic polypeptide"
MRFSTTLATAATALFFTASQVSAAPVNTTTEDETAQIPAEAVIGYLDLEGDFDVAVLPFSNSTNNGLLFINTTIASIAAKEEGVSLDKREAEA

SEQ ID NO: 54 - protein, 89 aa, Artificial Sequence
  source: /note="Description of Artificial Sequence: Synthetic polypeptide"
MLLQAFLFLLAGFAAKISAAPVNTTTEDETAQIPAEAVIGYLDLEGDFDVAVLPFSNSTNNGLLFINTTIASIAAKEEGVSLDKREAEA

SEQ ID NO: 55 - protein, 321 aa, Artificial Sequence
  source: /note="Description of Artificial Sequence: Synthetic polypeptide"
MQYKKTLVASALAATTLAAYAPSEPWSTLTPTATYSGGVTDYASTFGIAVQPISTTSSASSAATTASSKAKRAASQIGDGQVQAATTTASVSTKSTAAAVSQIGDGQIQATTKTTAAAVSQIGDGQIQATTKTTSAKTTAAAVSQISDGQIQATTTTLAPKSTAAAVSQIGDGQVQATTTTLAPKSTAAAVSQIGDGQVQATTKTTAAAVSQIGDGQVQATTKTTAAAVSQIGDGQVQATTKTTAAAVSQIGDGQVQATTKTTAAAVSQITDGQVQATTKTTQAASQVSDGQVQATTATSASAAATSTDPVDAVSCKTSGT

SEQ ID NO: 56 - protein, 322 aa, Artificial Sequence
  source: /note="Description of Artificial Sequence: Synthetic polypeptide"
MRFPSIFTAVLFAASSALAAYAPSEPWSTLTPTATYSGGVTDYASTFGIAVQPISTTSSASSAATTASSKAKRAASQIGDGQVQAATTTASVSTKSTAAAVSQIGDGQIQATTKTTAAAVSQIGDGQVQATTKTTSAKTTAAAVSQISDGQIQATTTTLAPKSTAAAVSQIGDGQVQATTTTLAPKSTAAAVSQIGDGQVQATTKTTAAAVSQIGDGQVQATTKTTAAAVSQIGDGQVQATTKTTAAAVSQIGDGQVQATTKTTAAAVSQITDGQVQATTKTTQAASQVSDGQVQATTATSASAAATSTDPVDAVSCKTSGT

SEQ ID NO: 57 - protein, 18 aa, Artificial Sequence
  source: /note="Description of Artificial Sequence: Synthetic peptide"
MQYKKTLVASALAATTLA

SEQ ID NO: 58 - protein, 329 aa, Artificial Sequence
  source: /note="Description of Artificial Sequence: Synthetic polypeptide"
MQYKKTLVASALAATTLAAYAPSEPWSTLTPTATYSGGVTDYASTFGIAVQPISTTSSASSAATTASSKAKRAASQIGDGQVQAATTTASVSTKSTAAAVSQIGDGQIQATTKTTAAAVSQIGDGQIQATTKTTSAKTTAAAVSQISDGQIQATTTTLAPKSTAAAVSQIGDGQVQATTTTLAPKSTAAAVSQIGDGQVQATTKTTAAAVSQIGDGQVQATTKTTAAAVSQIGDGQVQATTKTTAAAVSQIGDGQVQATTKTTAAAVSQITDGQVQATTKTTQAASQVSDGQVQATTATSASAAATSTDPVDAVSCKTSGTLEKREAEA

SEQ ID NO: 59 - protein, 19 aa, Artificial Sequence
  source: /note="Description of Artificial Sequence: Synthetic peptide"
MQLHSLIASTALLITSALA

SEQ ID NO: 60 - protein, 19 aa, Artificial Sequence
  source: /note="Description of Artificial Sequence: Synthetic peptide"
MRLSNLIASASLLSAATLA

SEQ ID NO: 61 - protein, 31 aa, Artificial Sequence
  source: /note="Description of Artificial Sequence: Synthetic polypeptide"
MRLSNLIASASLLSAATLAAPANHEHKDKRA

SEQ ID NO: 62 - protein, 19 aa, Artificial Sequence
  source: /note="Description of Artificial Sequence: Synthetic peptide"
MLSLKTLLCTLLTVSSVLA

SEQ ID NO: 63 - protein, 24 aa, Artificial Sequence
  source: /note="Description of Artificial Sequence: Synthetic peptide"
MLSLKTLLCTLLTVSSVLATPVPA

SEQ ID NO: 64 - protein, 30 aa, Artificial Sequence
  source: /note="Description of Artificial Sequence: Synthetic polypeptide"
MLSLKTLLCTLLTVSSVLATPVPARDPSSI

SEQ ID NO: 65 - protein, 285 aa, Artificial Sequence
  source: /note="Description of Artificial Sequence: Synthetic polypeptide"
MKLKTVRSAVLSSLFASQVLGQTTAQTNSGGLDVVGLISMAMSKGEELFTGVVPILVELDGDVNGHKFSVSGEGEGDATYGKLTLKLICTTGKLPVPWPTLVTTLGYGLQCFARYPDHMKQHDFFKSAMPEGYVQERTIFFKDDGNYKTRAEVKFEGDTLVNRIELKGIDFKEDGNILGHKLEYNYNSHNVYITADKQKNGIKANFKIRHNIEDGGVQLADHYQQNTPIGDGPVLLPDNHYLSYQSALSKDPNEKRDHMVLLEFVTAAGITHGMDELYKEEGEPK

SEQ ID NO: 66 - protein, 289 aa, Artificial Sequence
  source: /note="Description of Artificial Sequence: Synthetic polypeptide"
MKLKTVRSAVLSSLFASQVLGQTTAQTNSGGLDVVGLISMAKRKRMSKGEELFTGVVPILVELDGDVNGHKFSVSGEGEGDATYGKLTLKLICTTGKLPVPWPTLVTTLGYGLQCFARYPDHMKQHDFFKSAMPEGYVQERTIFFKDDGNYKTRAEVKFEGDTLVNRIELKGIDFKEDGNILGHKLEYNYNSHNVYITADKQKNGIKANFKIRHNIEDGGVQLADHYQQNTPIGDGPVLLPDNHYLSYQSALSKDPNEKRDHMVLLEFVTAAGITHGMDELYKEEGEPK

SEQ ID NO: 67 - protein, 49 aa, Artificial Sequence
  source: /note="Description of Artificial Sequence: Synthetic polypeptide"
MKLKTVRSAVLSSLFASQVLGQTTAQTNSGGLDVVGLISMAKREEGEPK

SEQ ID NO: 68 - protein, 47 aa, Artificial Sequence
  source: /note="Description of Artificial Sequence: Synthetic polypeptide"
MKLKTVRSAVLSSLFASQVLGQTTAQTNSGGLDVVGLISMAEEGEPK

SEQ ID NO: 69 - protein, 25 aa, Artificial Sequence
  source: /note="Description of Artificial Sequence: Synthetic peptide"
MRAFLFLTACISLPGVFGVEEGEPK

SEQ ID NO: 70 - protein, 28 aa, Artificial Sequence
  source: /note="Description of Artificial Sequence: Synthetic peptide"
MKLAYSLLLPLAGVSASVINYKRMAMVS

SEQ ID NO: 71 - protein, 28 aa, Artificial Sequence
  source: /note="Description of Artificial Sequence: Synthetic peptide"
MKFAYSLLLPLAGVSASVINYKRMAMVS

SEQ ID NO: 72 - protein, 19 aa, Artificial Sequence
  source: /note="Description of Artificial Sequence: Synthetic peptide"
MRAFLFLTACISLPGVFGV

SEQ ID NO: 73 - protein, 18 aa, Artificial Sequence
  source: /note="Description of Artificial Sequence: Synthetic peptide"
MRAFLFLTACISLPGVFG

SEQ ID NO: 74 - DNA, 276 bp, Artificial Sequence
  source: /note="Description of Artificial Sequence: Synthetic polynucleotide"
atgaggcaggtttggttctcttggattgtgggattgttcctatgttttttcaacgtgtcttctgctgctccagtcaacactacaacagaagatgaaacggcacaaattccggctgaagctgtcatcggttacttagatttagaaggggatttcgatgttgctgttttgccattttccaacagcacaaataacgggttattgtttataaatactactattgccagcattgctgctaaagaagaaggggtatctttggataaaagagaggctgaagct

SEQ ID NO: 75 - DNA, 267 bp, Artificial Sequence
  source: /note="Description of Artificial Sequence: Synthetic polynucleotide"
atgagatttccttcaatttttactgcagttttattcgcagcatcctccgcattagctgctccagtcaacactacaacagaagatgaaacggcacaaattccggctgaagctgtcatcggttacttagatttagaaggggatttcgatgttgctgttttgccattttccaacagcacaaataacgggttattgtttataaatactactattgccagcattgctgctaaagaagaaggggtatctttggataaaagagaggctgaagct

SEQ ID NO: 76 - DNA, 63 bp, Artificial Sequence
  source: /note="Description of Artificial Sequence: Synthetic oligonucleotide"
atgcaaagaccatttctactcgcttatttggtcctttcgcttctatttaactcagctttgggt

SEQ ID NO: 77 - DNA, 69 bp, Artificial Sequence
  source: /note="Description of Artificial Sequence: Synthetic oligonucleotide"
atgcgtttctctactacactcgctactgcagctactgcgctatttttcacagcctcccaagtttcagct

SEQ ID NO: 78 - DNA, 66 bp, Artificial Sequence
  source: /note="Description of Artificial Sequence: Synthetic oligonucleotide"
atgaggcaggtttggttctcttggattgtgggattgttcctatgttttttcaacgtgtcttctgct

SEQ ID NO: 79 - DNA, 57 bp, Artificial Sequence
  source: /note="Description of Artificial Sequence: Synthetic oligonucleotide"
atgcttttgcaagctttccttttccttttggctggttttgcagccaaaatatctgca

SEQ ID NO: 80 - DNA, 261 bp, Artificial Sequence
  source: /note="Description of Artificial Sequence: Synthetic polynucleotide"
atgtttaaatctgttgtttattcaattttagccgcttctttggccaatgcagctccagtcaacactacaacagaagatgaaacggcacaaattccggctgaagctgtcatcggttacttagatttagaaggggatttcgatgttgctgttttgccattttccaacagcacaaataacgggttattgtttataaatactactattgccagcattgctgctaaagaagaaggggtatctttggataaaagagaggctgaagct

SEQ ID NO: 81 - DNA, 264 bp, Artificial Sequence
  source: /note="Description of Artificial Sequence: Synthetic polynucleotide"
atgcagttacttcgctgtttttcaatattttctgttattgcttcagttttagcagctccagtcaacactacaacagaagatgaaacggcacaaattccggctgaagctgtcatcggttacttagatttagaaggggatttcgatgttgctgttttgccattttccaacagcacaaataacgggttattgtttataaatactactattgccagcattgctgctaaagaagaaggggtatctttggataaaagagaggctgaagct

SEQ ID NO: 82 - DNA, 273 bp, Artificial Sequence
  source: /note="Description of Artificial Sequence: Synthetic polynucleotide"
atgcaaagaccatttctactcgcttatttggtcctttcgcttctatttaactcagctttgggtgctccagtcaacactacaacagaagatgaaacggcacaaattccggctgaagctgtcatcggttacttagatttagaaggggatttcgatgttgctgttttgccattttccaacagcacaaataacgggttattgtttataaatactactattgccagcattgctgctaaagaagaaggggtatctttggataaaagagaggctgaagct

SEQ ID NO: 83 - DNA, 279 bp, Artificial Sequence
  source: /note="Description of Artificial Sequence: Synthetic polynucleotide"
atgcgtttctctactacactcgctactgcagctactgcgctatttttcacagcctcccaagtttcagctgctccagtcaacactacaacagaagatgaaacggcacaaattccggctgaagctgtcatcggttacttagatttagaaggggatttcgatgttgctgttttgccattttccaacagcacaaataacgggttattgtttataaatactactattgccagcattgctgctaaagaagaaggggtatctttggataaaagagaggctgaagct

SEQ ID NO: 84 - DNA, 267 bp, Artificial Sequence
  source: /note="Description of Artificial Sequence: Synthetic polynucleotide"
atgcttttgcaagctttccttttccttttggctggttttgcagccaaaatatctgcagctccagtcaacactacaacagaagatgaaacggcacaaattccggctgaagctgtcatcggttacttagatttagaaggggatttcgatgttgctgttttgccattttccaacagcacaaataacgggttattgtttataaatactactattgccagcattgctgctaaagaagaaggggtatctttggataaaagagaggctgaagct

SEQ ID NO: 85 - DNA, 963 bp, Artificial Sequence
  source: /note="Description of Artificial Sequence: Synthetic polynucleotide"
atgcaatacaaaaagactttggttgcctctgctttggccgctactacattggccgcctatgctccatctgagccttggtccactttgactccaacagccacttacagcggtggtgttaccgactacgcttccaccttcggtattgccgttcaaccaatctccactacatccagcgcatcatctgcagccaccacagcctcatctaaggccaagagagctgcttcccaaattggtgatggtcaagtccaagctgctaccactactgcttctgtctctaccaagagtaccgctgccgccgtttctcagatcggtgatggtcaaatccaagctactactaagactaccgctgctgctgtctctcaaattggtgatggtcaaattcaagctaccaccaagactacctctgctaagactaccgccgctgccgtttctcaaatcagtgatggtcaaatccaagctaccaccactactttagccccaaagagcaccgctgctgccgtttctcaaatcggtgatggtcaagttcaagctaccaccactactttagccccaaagagcaccgctgctgccgtttctcaaatcggtgatggtcaagttcaagctactactaagactaccgctgctgctgtctctcaaattggtgatggtcaagttcaagctaccaccaagactactgctgccgccgtttctcaaatcggtgatggtcaagttcaagctactaccaagactaccgctgctgctgtctctcaaatcggtgatggtcaagttcaagcaactaccaaaaccactgccgcagctgtttcccaaattactgacggtcaagttcaagccactacaaaaaccactcaagcagccagccaagtaagcgatggccaagtccaagctactactgctacttccgcttctgcagccgctacctccactgacccagtcgatgctgtctcctgtaagacttctggtacc

SEQ ID NO: 86 - DNA, 966 bp, Artificial Sequence
  source: /note="Description of Artificial Sequence: Synthetic polynucleotide"
atgagatttccttcaatttttactgcagttttattcgcagcatcctccgcattagctgcctatgctccatctgagccttggtccactttgactccaacagccacttacagcggtggtgttaccgactacgcttccaccttcggtattgccgttcaaccaatctccactacatccagcgcatcatctgcagccaccacagcctcatctaaggccaagagagctgcttcccaaattggtgatggtcaagtccaagctgctaccactactgcttctgtctctaccaagagtaccgctgccgccgtttctcagatcggtgatggtcaaatccaagctactactaagactaccgctgctgctgtctctcaaattggtgatggtcaagttcaagctaccaccaagactacctctgctaagactaccgccgctgccgtttctcaaatcagtgatggtcaaatccaagctaccaccactactttagccccaaagagcaccgctgctgccgtttctcaaatcggtgatggtcaagttcaagctaccaccactactttagccccaaagagcaccgctgctgccgtttctcaaatcggtgatggtcaagtccaagctactactaagactaccgctgctgctgtctctcaaattggtgatggtcaagttcaagctaccaccaagactactgctgccgccgtttctcaaatcggtgatggtcaagttcaagctactaccaagactaccgctgctgctgtctctcaaatcggtgatggtcaagttcaagcaactaccaaaaccactgccgcagctgtttcccaaattactgacggtcaagttcaagccactacaaaaaccactcaagcagccagccaagtaagcgatggccaagtccaagctactactgctacttccgcttctgcagccgctacctccactgacccagtcgatgctgtctcctgtaagacttctggtacc

SEQ ID NO: 87 - DNA, 54 bp, Artificial Sequence
  source: /note="Description of Artificial Sequence: Synthetic oligonucleotide"
atgcaatacaaaaagactttggttgcctctgctttggccgctactacattggcc

SEQ ID NO: 88 - DNA, 987 bp, Artificial Sequence
  source: /note="Description of Artificial Sequence: Synthetic polynucleotide"
atgcaatacaaaaagactttggttgcctctgctttggccgctactacattggccgcctatgctccatctgagccttggtccactttgactccaacagccacttacagcggtggtgttaccgactacgcttccaccttcggtattgccgttcaaccaatctccactacatccagcgcatcatctgcagccaccacagcctcatctaaggccaagagagctgcttcccaaattggtgatggtcaagtccaagctgctaccactactgcttctgtctctaccaagagtaccgctgccgccgtttctcagatcggtgatggtcaaatccaagctactactaagactaccgctgctgctgtctctcaaattggtgatggtcaaattcaagctaccaccaagactacctctgctaagactaccgccgctgccgtttctcaaatcagtgatggtcaaatccaagctaccaccactactttagccccaaagagcaccgctgctgccgtttctcaaatcggtgatggtcaagttcaagctaccaccactactttagccccaaagagcaccgctgctgccgtttctcaaatcggtgatggtcaagttcaagctactactaagactaccgctgctgctgtctctcaaattggtgatggtcaagttcaagctaccaccaagactactgctgccgccgtttctcaaatcggtgatggtcaagttcaagctactaccaagactaccgctgctgctgtctctcaaatcggtgatggtcaagttcaagcaactaccaaaaccactgccgcagctgtttcccaaattactgacggtcaagttcaagccactacaaaaaccactcaagcagccagccaagtaagcgatggccaagtccaagctactactgctacttccgcttctgcagccgctacctccactgacccagtcgatgctgtctcctgtaagacttctggtaccttggagaaaagagaggctgaagca

SEQ ID NO: 89 - DNA, 57 bp, Artificial Sequence
  source: /note="Description of Artificial Sequence: Synthetic oligonucleotide"
atgcaattacattcacttatcgcttcaactgcgctcttaataacgtcagctttggct

SEQ ID NO: 90 - DNA, 57 bp, Artificial Sequence
  source: /note="Description of Artificial Sequence: Synthetic oligonucleotide"
atgcgtctctctaacctaattgcttctgcctctcttttatctgctgctactcttgct

SEQ ID NO: 91 - DNA, 93 bp, Artificial Sequence
  source: /note="Description of Artificial Sequence: Synthetic oligonucleotide"
atgcgtctctctaacctaattgcttctgcctctcttttatctgctgctactcttgctgctcccgctaaccacgaacacaaggacaagcgtgct

SEQ ID NO: 92 - DNA, 57 bp, Artificial Sequence
  source: /note="Description of Artificial Sequence: Synthetic oligonucleotide"
atgctttcgcttaaaacgttactgtgtacgttgttgactgtgtcatcagtactcgct

SEQ ID NO: 93 - DNA, 72 bp, Artificial Sequence
  source: /note="Description of Artificial Sequence: Synthetic oligonucleotide"
atgctttcgcttaaaacgttactgtgtacgttgttgactgtgtcatcagtactcgctaccccagtccctgca

SEQ ID NO: 94 - DNA, 90 bp, Artificial Sequence
  source: /note="Description of Artificial Sequence: Synthetic oligonucleotide"
atgctttcgcttaaaacgttactgtgtacgttgttgactgtgtcatcagtactcgctaccccagtccctgcaagagacccttcttccatt

SEQ ID NO: 95 - DNA, 855 bp, Artificial Sequence
  source: /note="Description of Artificial Sequence: Synthetic polynucleotide"
atgaaactgaaaactgtaagatctgcggtcctttcgtcactctttgcatcgcaggttctcggtcaaaccactgcccagactaatagtggcggacttgacgtggtggggttaatttctatggcgatgtctaaaggtgaagaattattcactggtgttgtcccaattttggttgaattagatggtgatgttaatggtcacaaattttctgtctccggtgaaggtgaaggtgatgctacttacggtaaattgaccttaaaattgatttgtactactggtaaattgccagttccatggccaaccttagtcactactttaggttatggtttgcaatgttttgctagatacccagatcatatgaaacaacatgactttttcaagtctgccatgccagaaggttatgttcaagaaagaactatttttttcaaagatgacggtaactacaagaccagagctgaagtcaagtttgaaggtgataccttagttaatagaatcgaattaaaaggtattgattttaaagaagatggtaacattttaggtcacaaattggaatacaactataactctcacaatgtttacatcactgctgacaaacaaaagaatggtatcaaagctaacttcaaaattagacacaacattgaagatggtggtgttcaattagctgaccattatcaacaaaatactccaattggtgatggtccagtcttgttaccagacaaccattacttatcctatcaatctgccttatccaaagatccaaacgaaaagagagaccacatggtcttgttagaatttgttactgctgctggtattacccatggtatggatgaattgtacaaagaagaaggtgaaccaaaa

SEQ ID NO: 96 - DNA, 867 bp, Artificial Sequence
  source: /note="Description of Artificial Sequence: Synthetic polynucleotide"
atgaaactgaaaactgtaagatctgcggtcctttcgtcactctttgcatcgcaggttctcggtcaaaccactgcccagactaatagtggcggacttgacgtggtggggttaatttctatggcgaagaggaaaagaatgtctaaaggtgaagaattattcactggtgttgtcccaattttggttgaattagatggtgatgttaatggtcacaaattttctgtctccggtgaaggtgaaggtgatgctacttacggtaaattgaccttaaaattgatttgtactactggtaaattgccagttccatggccaaccttagtcactactttaggttatggtttgcaatgttttgctagatacccagatcatatgaaacaacatgactttttcaagtctgccatgccagaaggttatgttcaagaaagaactatttttttcaaagatgacggtaactacaagaccagagctgaagtcaagtttgaaggtgataccttagttaatagaatcgaattaaaaggtattgattttaaagaagatggtaacattttaggtcacaaattggaatacaactataactctcacaatgtttacatcactgctgacaaacaaaagaatggtatcaaagctaacttcaaaattagacacaacattgaagatggtggtgttcaattagctgaccattatcaacaaaatactccaattggtgatggtccagtcttgttaccagacaaccattacttatcctatcaatctgccttatccaaagatccaaacgaaaagagagaccacatggtcttgttagaatttgttactgctgctggtattacccatggtatggatgaattgtacaaagaagaaggtgaaccaaaa

SEQ ID NO: 97 - DNA, 147 bp, Artificial Sequence
  source: /note="Description of Artificial Sequence: Synthetic polynucleotide"
atgaaactgaaaactgtaagatctgcggtcctttcgtcactctttgcatcgcaggttctcggtcaaaccactgcccagactaatagtggcggacttgacgtggtggggttaatttctatggcgaaaagagaagaaggtgaaccaaaa

SEQ ID NO: 98 - DNA, 141 bp, Artificial Sequence
  source: /note="Description of Artificial Sequence: Synthetic polynucleotide"
atgaaactgaaaactgtaagatctgcggtcctttcgtcactctttgcatcgcaggttctcggtcaaaccactgcccagactaatagtggcggacttgacgtggtggggttaatttctatggcggaagaaggtgaaccaaaa

SEQ ID NO: 99 - DNA, 75 bp, Artificial Sequence
  source: /note="Description of Artificial Sequence: Synthetic oligonucleotide"
atgagagctttcttgtttctcaccgcatgcatcagtttgccaggcgtttttggggtggaagaaggtgaaccaaaa

SEQ ID NO: 100 - DNA, 84 bp, Artificial Sequence
  source: /note="Description of Artificial Sequence: Synthetic oligonucleotide"
atgaagttagcatactccctcttgcttccattggcaggagtcagtgcttcagttatcaattacaagagaatggcaatggtatca

SEQ ID NO: 101 - DNA, 84 bp, Artificial Sequence
  source: /note="Description of Artificial Sequence: Synthetic oligonucleotide"
atgaagttcgcatactccctcttgcttccattggcaggagtcagtgcttcagttatcaattacaagagaatggcaatggtatca

SEQ ID NO: 102 - DNA, 57 bp, Artificial Sequence
  source: /note="Description of Artificial Sequence: Synthetic oligonucleotide"
atgagagctttcttgtttctcaccgcatgcatcagtttgccaggcgtttttggggtg

SEQ ID NO: 103 - DNA, 54 bp, Artificial Sequence
  source: /note="Description of Artificial Sequence: Synthetic oligonucleotide"
atgagagctttcttgtttctcaccgcatgcatcagtttgccaggcgtttttggg

SEQ ID NO: 104 - protein, 250 aa, Artificial Sequence
  source: /note="Description of Artificial Sequence: Synthetic polypeptide"
MESVSSLFNIFSTIMVNYKSLVLALLSVSNLKYARGAYAPKDPWSTLTPSATYKGGITDYSSSFGIAIEAVATSASSVASSKAKRAASQIGDGQVQAATTTAAVSKKSTAAAVSQITDGQVQAAKSTAAAVSQITDGQVQAAKSTAAAVSQITDGQVQAAKSTAAAVSQITDGQVQAAKSTAAAASQISDGQVQATTSTKAAASQITDGQIQASKTTSGASQVSDGQVQATAEVKDANDPVDVVSCNNNS

SEQ ID NO: 105 - protein, 258 aa, Artificial Sequence
  source: /note="Description of Artificial Sequence: Synthetic polypeptide"
MESVSSLFNIFSTIMVNYKSLVLALLSVSNLKYARGAYAPKDPWSTLTPSATYKGGITDYSSSFGIAIEAVATSASSVASSKAKRAASQIGDGQVQAATTTAAVSKKSTAAAVSQITDGQVQAAKSTAAAVSQITDGQVQAAKSTAAAVSQITDGQVQAAKSTAAAVSQITDGQVQAAKSTAAAASQISDGQVQATTSTKAAASQITDGQIQASKTTSGASQVSDGQVQATAEVKDANDPVDVVSCNNNSTLEKREAE

SEQ ID NO: 106 - protein, 259 aa, Artificial Sequence
  source: /note="Description of Artificial Sequence: Synthetic polypeptide"
MESVSSLFNIFSTIMVNYKSLVLALLSVSNLKYARGAYAPKDPWSTLTPSATYKGGITDYSSSFGIAIEAVATSASSVASSKAKRAASQIGDGQVQAATTTAAVSKKSTAAAVSQITDGQVQAAKSTAAAVSQITDGQVQAAKSTAAAVSQITDGQVQAAKSTAAAVSQITDGQVQAAKSTAAAASQISDGQVQATTSTKAAASQITDGQIQASKTTSGASQVSDGQVQATAEVKDANDPVDVVSCNNNSTLEKREAEA

SEQ ID NO: 107 - protein, 257 aa, Artificial Sequence
  source: /note="Description of Artificial Sequence: Synthetic polypeptide"
MESVSSLFNIFSTIMVNYKSLVLALLSVSNLKYARGAYAPKDPWSTLTPSATYKGGITDYSSSFGIAIEAVATSASSVASSKAKRAASQIGDGQVQAATTTAAVSKKSTAAAVSQITDGQVQAAKSTAAAVSQITDGQVQAAKSTAAAVSQITDGQVQAAKSTAAAVSQITDGQVQAAKSTAAAASQISDGQVQATTSTKAAASQITDGQIQASKTTSGASQVSDGQVQATAEVKDANDPVDVVSCNNNSTEEGEPK

SEQ ID NO: 108 - protein, 239 aa, Artificial Sequence
  source: /note="Description of Artificial Sequence: Synthetic polypeptide"
MQYKKPLVVSALAATSLAAYAPKDPWSTLTPSATYKGGITDYSSSFGIAIEAVATSASSVASSKAKRAASQIGDGQVQAATTTAAVSKKSTAAAVSQITDGQVQAAKSTAAAVSQITDGQVQAAKSTAAAVSQITDGQVQAAKSTAAAVSQITDGQVQAAKSTAAAASQISDGQVQATTSTKAAASQITDGQIQASKTTSGASQVSDGQVQATAEVKDANDPVDVVSCNNNSTEEGEPK

SEQ ID NO: 109 - protein, 265 aa, Artificial Sequence
  source: /note="Description of Artificial Sequence: Synthetic polypeptide"
MESVSSLFNIFSTIMVNYKSLVLALLSVSNLKYARGAYAPKDPWSTLTPSATYKGGITDYSSSFGIAIEAVATSASSVASSKAKRAASQIGDGQVQAATTTAAVSKKSTAAAVSQITDGQVQAAKSTAAAVSQITDGQVQAAKSTAAAVSQITDGQVQAAKSTAAAVSQITDGQVQAAKSTAAAASQISDGQVQATTSTKAAASQITDGQIQASKTTSGASQVSDGQVQATAEVKDANDPVDVVSCNNNSTLEKREAEAEEGEPK

SEQ ID NO: 110 - protein, 250 aa, Artificial Sequence; identical to SEQ ID NO: 104
  source: /note="Description of Artificial Sequence: Synthetic polypeptide"

SEQ ID NO: 111 - DNA, 750 bp, Artificial Sequence
  source: /note="Description of Artificial Sequence: Synthetic polynucleotide"
atggaatctgtttcttctttgttcaacatcttctctactatcatggttaactacaagtctttggttttggctttgttgtctgtttctaacttgaagtacgctagaggtgcctatgctccaaaggacccgtggtccactttaactccatcagctacttacaagggtggtataacagattactcttcgagtttcggtattgctattgaagccgtggctaccagtgcttcctccgtcgcctcatctaaagcaaagagagccgcctctcagataggtgatggtcaagtacaggctgccactactactgctgctgtttctaagaaatccaccgctgctgctgtttctcaaataactgacggtcaagttcaagctgctaagtctactgccgctgctgtttcccaaataactgacggtcaagttcaagctgctaagtctactgccgctgccgtttctcaaataactgacggtcaagttcaagctgctaagtctactgccgctgccgtttctcaaataactgatggtcaagttcaagctgccaagtctactgctgccgctgcctctcagatttctgacggccaagttcaggccactacctctactaaggctgctgcatcccaaattacagatgggcagatacaagcatctaaaactaccagtggcgctagtcaagtaagtgatggccaagtccaggctactgctgaagtgaaagacgctaacgatccagtcgatgttgtttcctgtaataacaatagt

SEQ ID NO: 112 - DNA, 774 bp, Artificial Sequence
  source: /note="Description of Artificial Sequence: Synthetic polynucleotide"
atggaatctgtttcttctttgttcaacatcttctctactatcatggttaactacaagtctttggttttggctttgttgtctgtttctaacttgaagtacgctagaggtgcctatgctccaaaggacccgtggtccactttaactccatcagctacttacaagggtggtataacagattactcttcgagtttcggtattgctattgaagccgtggctaccagtgcttcctccgtcgcctcatctaaagcaaagagagccgcctctcagataggtgatggtcaagtacaggctgccactactactgctgctgtttctaagaaatccaccgctgctgctgtttctcaaataactgacggtcaagttcaagctgctaagtctactgccgctgctgtttcccaaataactgacggtcaagttcaagctgctaagtctactgccgctgccgtttctcaaataactgacggtcaagttcaagctgctaagtctactgccgctgccgtttctcaaataactgatggtcaagttcaagctgccaagtctactgctgccgctgcctctcagatttctgacggccaagttcaggccactacctctactaaggctgctgcatcccaaattacagatgggcagatacaagcatctaaaactaccagtggcgctagtcaagtaagtgatggccaagtccaggctactgctgaagtgaaagacgctaacgatccagtcgatgttgtttcctgtaataacaatagtaccttggagaaaagagaggctgaa

SEQ ID NO: 113 - DNA, 777 bp, Artificial Sequence
  source: /note="Description of Artificial Sequence: Synthetic polynucleotide"
atggaatctgtttcttctttgttcaacatcttctctactatcatggttaactacaagtctttggttttggctttgttgtctgtttctaacttgaagtacgctagaggtgcctatgctccaaaggacccgtggtccactttaactccatcagctacttacaagggtggtataacagattactcttcgagtttcggtattgctattgaagccgtggctaccagtgcttcctccgtcgcctcatctaaagcaaagagagccgcctctcagataggtgatggtcaagtacaggctgccactactactgctgctgtttctaagaaatccaccgctgctgctgtttctcaaataactgacggtcaagttcaagctgctaagtctactgccgctgctgtttcccaaataactgacggtcaagttcaagctgctaagtctactgccgctgccgtttctcaaataactgacggtcaagttcaagctgctaagtctactgccgctgccgtttctcaaataactgatggtcaagttcaagctgccaagtctactgctgccgctgcctctcagatttctgacggccaagttcaggccactacctctactaaggctgctgcatcccaaattacagatgggcagatacaagcatctaaaactaccagtggcgctagtcaagtaagtgatggccaagtccaggctactgctgaagtgaaagacgctaacgatccagtcgatgttgtttcctgtaataacaatagtaccttggagaaaagagaggctgaagca

SEQ ID NO: 114 - DNA, 771 bp, Artificial Sequence
  source: /note="Description of Artificial Sequence: Synthetic polynucleotide"
atggaatctgtttcttctttgttcaacatcttctctactatcatggttaactacaagtctttggttttggctttgttgtctgtttctaacttgaagtacgctagaggtgcctatgctccaaaggacccgtggtccactttaactccatcagctacttacaagggtggtataacagattactcttcgagtttcggtattgctattgaagccgtggctaccagtgcttcctccgtcgcctcatctaaagcaaagagagccgcctctcagataggtgatggtcaagtacaggctgccactactactgctgctgtttctaagaaatccaccgctgctgctgtttctcaaataactgacggtcaagttcaagctgctaagtctactgccgctgctgtttcccaaataactgacggtcaagttcaagctgctaagtctactgccgctgccgtttctcaaataactgacggtcaagttcaagctgctaagtctactgccgctgccgtttctcaaataactgatggtcaagttcaagctgccaagtctactgctgccgctgcctctcagatttctgacggccaagttcaggccactacctctactaaggctgctgcatcccaaattacagatgggcagatacaagcatctaaaactaccagtggcgctagtcaagtaagtgatggccaagtccaggctactgctgaagtgaaagacgctaacgatccagtcgatgttgtttcctgtaataacaatagtaccgaagaaggtgaaccaaaa

SEQ ID NO: 115 - DNA, 717 bp, Artificial Sequence
  source: /note="Description of Artificial Sequence: Synthetic polynucleotide"
atgcaatataaaaagccattagtcgtctccgctttagctgctacatctttagctgcctatgctccaaaggacccgtggtccactttaactccatcagctacttacaagggtggtataacagattactcttcgagtttcggtattgctattgaagccgtggctaccagtgcttcctccgtcgcctcatctaaagcaaagagagccgcctctcagataggtgatggtcaagtacaggctgccactactactgctgctgtttctaagaaatccaccgctgctgctgtttctcaaataactgacggtcaagttcaagctgctaagtctactgccgctgctgtttcccaaataactgacggtcaagttcaagctgctaagtctactgccgctgccgtttctcaaataactgacggtcaagttcaagctgctaagtctactgccgctgccgtttctcaaataactgatggtcaagttcaagctgccaagtctactgctgccgctgcctctcagatttctgacggccaagttcaggccactacctctactaaggctgctgcatcccaaattacagatgggcagatacaagcatctaaaactaccagtggcgctagtcaagtaagtgatggccaagtccaggctactgctgaagtgaaagacgctaacgatccagtcgatgttgtttcctgtaataacaatagtaccgaagaaggtgaaccaaaa

SEQ ID NO: 116 - DNA, 795 bp, Artificial Sequence
  source: /note="Description of Artificial Sequence: Synthetic polynucleotide"
atggaatctgtttcttctttgttcaacatcttctctactatcatggttaactacaagtctttggttttggctttgttgtctgtttctaacttgaagtacgctagaggtgcctatgctccaaaggacccgtggtccactttaactccatcagctacttacaagggtggtataacagattactcttcgagtttcggtattgctattgaagccgtggctaccagtgcttcctccgtcgcctcatctaaagcaaagagagccgcctctcagataggtgatggtcaagtacaggctgccactactactgctgctgtttctaagaaatccaccgctgctgctgtttctcaaataactgacggtcaagttcaagctgctaagtctactgccgctgctgtttcccaaataactgacggtcaagttcaagctgctaagtctactgccgctgccgtttctcaaataactgacggtcaagttcaagctgctaagtctactgccgctgccgtttctcaaataactgatggtcaagttcaagctgccaagtctactgctgccgctgcctctcagatttctgacggccaagttcaggccactacctctactaaggctgctgcatcccaaattacagatgggcagatacaagcatctaaaactaccagtggcgctagtcaagtaagtgatggccaagtccaggctactgctgaagtgaaagacgctaacgatccagtcgatgttgtttcctgtaataacaatagtaccttggagaaaagagaggctgaagcagaagaaggtgaaccaaaa

SEQ ID NO: 117 - DNA, 741 bp, Artificial Sequence
  source: /note="Description of Artificial Sequence: Synthetic polynucleotide"
atgcaatataaaaagccattagtcgtctccgctttagctgctacatctttagctgcctatgctccaaaggacccgtggtccactttaactccatcagctacttacaagggtggtataacagattactcttcgagtttcggtattgctattgaagccgtggctaccagtgcttcctccgtcgcctcatctaaagcaaagagagccgcctctcagataggtgatggtcaagtacaggctgccactactactgctgctgtttctaagaaatccaccgctgctgctgtttctcaaataactgacggtcaagttcaagctgctaagtctactgccgctgctgtttcccaaataactgacggtcaagttcaagctgctaagtctactgccgctgccgtttctcaaataactgacggtcaagttcaagctgctaagtctactgccgctgccgtttctcaaataactgatggtcaagttcaagctgccaagtctactgctgccgctgcctctcagatttctgacggccaagttcaggccactacctctactaaggctgctgcatcccaaattacagatgggcagatacaagcatctaaaactaccagtggcgctagtcaagtaagtgatggccaagtccaggctactgctgaagtgaaagacgctaacgatccagtcgatgttgtttcctgtaataacaatagtaccttggagaaaagagaggctgaagcagaagaaggtgaaccaaaa

SEQ ID NO: 118 - protein, 8 aa, Unknown
  source: /note="Description of Unknown: cleavage site sequence"
LEKREAEA

SEQ ID NO: 119 - DNA, 1638 bp, Unknown
  source: /note="Description of Unknown: THCA synthase sequence"
atgaactgctccgcattctctttctggttcgtctgtaaaataatcttcttcttcttgtccttcaacatccaaatctccatcgcaaatccacaagaaaactttttgaagtgtttctccgaatacatcccaaacaaccctgctaacccaaagtttatatatactcaacatgatcaattgtacatgtccgttttgaacagtaccatccaaaatttgagattcacttctgacactacaccaaaacctttagtcattgttacaccttccaatgttagtcacattcaagcttctatattgtgctctaagaaagtaggtttgcaaatcagaactagatcaggtggtcatgatgcagaaggcatgtcttacatctcacaagttccattcgttgtagtcgatttgagaaatatgcattccataaagatcgacgttcacagtcaaacagcatgggtagaagcaggtgccaccttgggtgaagtttactactggatcaacgaaaagaatgaaaacttttctttccctggtggttactgtccaacagtaggtgtcggtggtcacttttctggtggtggttatggtgcattgatgagaaactacggtttagctgcagataatattatagacgcccatttggttaacgtagatggtaaagttttggacagaaagtctatgggtgaagatttgttttgggccataagaggtggtggtggtgaaaatttcggtatcattgccgcttggaaaattaagttagtcgctgttccttccaaaagtactattttctctgtcaaaaagaacatggaaatccacggtttggttaagttgtttaataagtggcaaaacatcgcttacaagtacgataaggacttggttttgatgacccatttcatcactaaaaatattacagataaccatggtaaaaataagaccactgttcacggttatttttcttcaattttccatggtggtgtagattctttggttgatttgatgaataagtcattcccagaattgggtattaaaaagacagattgcaaggaattttcttggatagacacaaccatcttctattcaggtgttgtaaacttcaacaccgctaacttcaaaaaggaaatcttgttggatagatccgctggtaaaaagaccgctttttctattaaattggactacgttaagaaaccaatccctgaaactgcaatggtcaagatattggaaaagttgtacgaagaagatgtaggtgtcggcatgtacgttttgtatccatacggtggtattatggaagaaatatctgaatcagccataccatttcctcacagagctggtatcatgtatgaattatggtacacagcctcatgggaaaagcaagaagataacgaaaagcatatcaactgggtcagatccgtttacaacttcactacaccttacgttagtcaaaacccaagattggcatatttgaactacagagatttggacttaggtaaaactaaccctgaatctccaaataactatacacaagcaagaatttggggtgaaaagtactttggtaaaaatttcaacagattagttaaagtaaagactaaagccgaccctaacaactttttcagaaacgaacaatccatcccacctttgccacctcaccaccactaa

SEQ ID NO: 120 - protein, 545 aa, Unknown
  source: /note="Description of Unknown: THCA synthase sequence"
MNCSAFSFWFVCKIIFFFLSFNIQISIANPQENFLKCFSEYIPNNPANPKFIYTQHDQLYMSVLNSTIQNLRFTSDTTPKPLVIVTPSNVSHIQASILCSKKVGLQIRTRSGGHDAEGMSYISQVPFVVVDLRNMHSIKIDVHSQTAWVEAGATLGEVYYWINEKNENFSFPGGYCPTVGVGGHFSGGGYGALMRNYGLAADNIIDAHLVNVDGKVLDRKSMGEDLFWAIRGGGGENFGIIAAWKIKLVAVPSKSTIFSVKKNMEIHGLVKLFNKWQNIAYKYDKDLVLMTHFITKNITDNHGKNKTTVHGYFSSIFHGGVDSLVDLMNKSFPELGIKKTDCKEFSWIDTTIFYSGVVNFNTANFKKEILLDRSAGKKTAFSIKLDYVKKPIPETAMVKILEKLYEEDVGVGMYVLYPYGGIMEEISESAIPFPHRAGIMYELWYTASWEKQEDNEKHINWVRSVYNFTTPYVSQNPRLAYLNYRDLDLGKTNPESPNNYTQARIWGEKYFGKNFNRLVKVKTKADPNNFFRNEQSIPPLPPHHH

SEQ ID NO: 121 - protein, 17 aa, Artificial Sequence
  source: /note="Description of Artificial Sequence: Synthetic peptide"
MFKSVVYSILAASLANA

SEQ ID NO: 122 - protein, 321 aa, Artificial Sequence
  source: /note="Description of Artificial Sequence: Synthetic polypeptide"
MQYKKTLVASALAATTLAAYAPSEPWSTLTPTATYSGGVTDYASTFGIAVQPISTTSSASSAATTASSKAKRAASQIGDGQVQAATTTASVSTKSTAAAVSQIGDGQIQATTKTTAAAVSQIGDGQIQATTKTTSANTTAAAVSQISDGQIQATTTTLAPKSTAAAVSQIGDGQVQATTTTLAPKSTAAAVSQIGDGQVQATTKTTAAAVSQIGDGQVQATTKTTAAAVSQIGDGQVQATTKTTAAAVSQIGDGQVQATTKTTAAAVSQITDGQVQATTKTTQAASQVSDGQVQATTATSASAAATSTDPVDAVSCKTSGT

SEQ ID NO: 123 - protein, 233 aa, Artificial Sequence
  source: /note="Description of Artificial Sequence: Synthetic polypeptide"
MQYKKPLVVSALAATSLAAYAPKDPWSTLTPSATYKGGITDYSSSFGIAIEAVATSASSVASSKAKRAAYQIGDGQVQAATTTAAVSKKSTAAAVSQITDGQVQAAKSTAAAVSQITDGQVQAAKSTAAAVSQITDGQVQAAKSTAAAVSQITDGQVQAAKSTAAAASQISDDQVQATTYTKAAASQITDGQIQASKTTSGASQVSDGQVQATAEVKDANDPVDVVSCNNNST

SEQ ID NO: 124 - protein, 233 aa, Artificial Sequence
  source: /note="Description of Artificial Sequence: Synthetic polypeptide"
MQYKKPLVVSALAATSLAAYAPKDPWSTLTPSATYKGGITDYSSSFGIAIEAVATSASSVASSKAKRAASQIGDGQVQAATTTAAVSKKSTAAAVSQITDGQVQAAKSTAAAVSQITDGQVQAAKSTAAAVSQITDGQVQAAKSTAAAVSQITDGQVQAAKSTAAAASQISDGQVQATTSTKAAASQITDGQIQASKTTSGASQVSDGQVQATAEVKDANDPVDVVSCNNNST

SEQ ID NO: 125 - protein, 234 aa, Artificial Sequence
  source: /note="Description of Artificial Sequence: Synthetic polypeptide"
MRFPSIFTAVLFAASSALAAYAPKDPWSTLTPSATYKGGITDYSSSFGIAIEAVATSASSVASSKAKRAASQIGDGQVQAATTTAAVSKKSTAAAVSQITDGQVQAAKSTAAAVSQITDGQVQAAKSTAAAVSQITDGQVQAAKSTAAAVSQITDGQVQAAKSTAAAASQISDGQVQATTSTKAAASQITDGQIQASKTTSGASQVSDGQVQATAEVKDANDPVDVVSCNNNST

SEQ ID NO: 126 - protein, 18 aa, Artificial Sequence
  source: /note="Description of Artificial Sequence: Synthetic peptide"
MQYKKPLVVSALAATSLA

SEQ ID NO: 127 - protein, 329 aa, Artificial Sequence
  source: /note="Description of Artificial Sequence: Synthetic polypeptide"
MQYKKTLVASALAATTLAAYAPSEPWSTLTPTATYSGGVTDYASTFGIAVQQISTTSSASSAATTASSKAKRAASQIGDGQVQAATTTASVSTKSTAAAVSQIGDGQIQATTKTTAAAVSQIGDGQIQATTKTTSAKTTAAAVSQISDGQIQATTTTLAPKSTAAAVSQIGDGQVQATTTTLAPKSTAAAVSQIGDGQVQATTKTTAAAVSQIGDGQVQATTKTTAAAVSQIGDGQVQATTKTTAAAVSQIGDGQVQATTKTTAAAVSQITDGQVQATTKTTQAASQVSDGQVQATTATSASAAATSTDPVDAVSCKTSGTLEKREAEA

SEQ ID NO: 128 - protein, 329 aa, Artificial Sequence
  source: /note="Description of Artificial Sequence: Synthetic polypeptide"
MQYKKTLVASALAATTLAAYAPSEPWSTLTPTATYSGGVTDYASTFGIAVQPISTTSSASSAATTASSKAKRAASQIGDGQVQAATTTASVSTKSTAAAVSQIGDGQIQATTKTTAAAVSQICDGQIQATTKTTSAKTTAAAVSQISDGQIQATTTTLAPKSTAAAVSQIGDGQVQATTTTLAPKSTAAAVSQIGDGQVQATTKTTAAAVSQIGDGQVQATTKTTAAAVSQIGDGQVQATTKTTAAAVSQIGDGQVQATTKTTAAAVSQITDGQVQATTKTTQAASQVSDGQVQATTATSASAAATSTDPVDAVSCKTSGTLEKREAEA

SEQ ID NO: 129 - protein, 330 aa, Artificial Sequence
  source: /note="Description of Artificial Sequence: Synthetic polypeptide"
MRFPSIFTAVLFAASSALAAYAPSEPWSTLTPTATYSGGVTDYASTFGIAVQPISTTSSASSAATTASSKAKRAASQIGDGQVQAATTTASVSTKSTAAAVSQIGDGQIQATTKTTAAAVSQIGDGQIQATTKTTSAKTTAAAVSQISDGQIQATTTTLAPKSTAAAVSQIGDGQVQATTTTLAPKSTAAAVSQIGDGQVQATTKTTAAAVSQIGDGQVQATTKTTAAAVSQIGDGQVQATTKTTAAAVSQIGDGQVQATTKTTAAAVSQITDGQVQATTKTTQAASQVSDGQVQATTATSASAAATSTDPVDAVSCKTSGTLEKREAEA

SEQ ID NO: 130 - protein, 241 aa, Artificial Sequence
  source: /note="Description of Artificial Sequence: Synthetic polypeptide"
MQYKKPLVVSALAATSLAAYAPKDPWSTLTPSATYKGGITDYSSSFGIAIEAVATSASSVASSKAKRAASQIGDGQVQAATTTAAVSKKSTAAAVSQITDGQVQAAKSTAAAVSQITDGQVQAAKSTAAAVSQITDGQVQAAKSTAAAVSQITDGQVQAAKSTAAAASQISDGQVQATTSTKAAASQITDGQIQASKTTSGASQVSDGQVQATAEVKDANDPVDVVSCNNNSTLEKREAEA

SEQ ID NO: 131 - protein, 269 aa, Artificial Sequence
  source: /note="Description of Artificial Sequence: Synthetic polypeptide"
MQYKKPLVVSALAATSLAAYAPKDPWSTLTPSATYKGGITDYSSSFGIAIEAVATSASSVASSKAKRAASQIGDGQVQAATTTAAVSKKSTAAAVSQITDGQVQAAKSTAAAVSQITDGQVQAAKSTSAAVSQITDGQVQAAKSTAAAVSQITDGQVQAAKSTAAAASQISDGQVQATTSTKAAASQITDGQIQASKTTSGASQVSDGQVQATAEVKDANDPVDVVSCNNNSTLEKREAEAMNCSAFSFWFVCKIIFFFLSFNIQISIA

SEQ ID NO: 132 - protein, 242 aa, Artificial Sequence
  source: /note="Description of Artificial Sequence: Synthetic polypeptide"
MRFPSIFTAVLFAASSALAAYAPKDPWSTLTPSATYKGGITDYSSSFGIAIEAVATSASSVASSKAKRAASQIGDGQVQAATTTAAVSKKSTAAAVSQITDGQVQAAKSTAAAVSQITDGQVQAAKSTAAAVSQITDGQVQAAKSTAAAVSQITDGQVQAAKSTAAAASQISDGQVQATTSTKAAASQITDGQIQASKTTSGASQVSDGQVQATAEVKDANDPVDVVSCNNNSTLEKREAEA

SEQ ID NO: 133 - protein, 289 aa, Artificial Sequence
  source: /note="Description of Artificial Sequence: Synthetic polypeptide"
MKLKTVRSAVLSSLFASQVLGQTTAQTNSGGLDVVGLISMAKRKREEGEPKMSKGEELFTGVVPILVELDGDVNGHKFSVSGEGEGDATYGKLTLKLICTTGKLPVPWPTLVTTLGYGLQCFARYPDHMKQHDFFKSAMPEGYVQERTIFFKDDGNYKTRAEVKFEGDTLVNRIELKGIDFKEDGNILGHKLEYNYNSHNVYITADKQKNGIKANFKIRHNIEDGGVQLADHYQQNTPIGDGPVLLPDNHYLSYQSALSKDPNEKRDHMVLLEFVTAAGITHGMDELYK

SEQ ID NO: 134 - protein, 42 aa, Artificial Sequence
  source: /note="Description of Artificial Sequence: Synthetic polypeptide"
MESVSSLFNIFSTIMVNYKSLVLALLSVSNLKYARGEEGEPK

SEQ ID NO: 135 - protein, 34 aa, Artificial Sequence
  source: /note="Description of Artificial Sequence: Synthetic polypeptide"
MKLAYSLLLPLAGVSASVINYKRMAMVSEEGEPK

SEQ ID NO: 136 - protein, 34 aa, Artificial Sequence
  source: /note="Description of Artificial Sequence: Synthetic polypeptide"
MKFAYSLLLPLAGVSASVINYKRMAMVSEEGEPK

SEQ ID NO: 137 - protein, 36 aa, Artificial Sequence
  source: /note="Description of Artificial Sequence: Synthetic polypeptide"
MESVSSLFNIFSTIMVNYKSLVLALLSVSNLKYARG

SEQ ID NO: 138 - protein, 51 aa, Artificial Sequence
  source: /note="Description of Artificial Sequence: Synthetic polypeptide"
MKLKTVRSAVLSSLFASQVLGQTTAQTNSGGLDVVGLISMAKRKREEGEPK

SEQ ID NO: 139 - DNA, 51 bp, Artificial Sequence
  source: /note="Description of Artificial Sequence: Synthetic oligonucleotide"
atgtttaaatctgttgtttattcaattttagccgcttctttggccaatgca

SEQ ID NO: 140 - DNA, 963 bp, Artificial Sequence
  source: /note="Description of Artificial Sequence: Synthetic polynucleotide"
atgcaatacaaaaagactttggttgcctctgctttggccgctactacattggccgcctatgctccatctgagccttggtccactttgactccaacagccacttacagcggtggtgttaccgactacgcttccaccttcggtattgccgttcaaccaatctccactacatccagcgcatcatctgcagccaccacagcctcatctaaggccaagagagctgcttcccaaattggtgatggtcaagtccaagctgctaccactactgcttctgtctctaccaagagtaccgctgccgccgtttctcagatcggtgatggtcaaatccaagctactactaagactaccgctgctgctgtctctcaaattggtgatggtcaaattcaagctaccaccaagactacctctgctaatactaccgccgctgccgtttctcaaatcagtgatggtcaaatccaagctaccaccactactttagccccaaagagcaccgctgctgccgtttctcaaatcggtgatggtcaagttcaagctaccaccactactttagccccaaagagcaccgctgctgccgtttctcaaatcggtgatggtcaagttcaagctactactaagactaccgctgctgctgtctctcaaattggtgatggtcaagttcaagctaccaccaagactactgctgccgccgtttctcaaatcggtgatggtcaagttcaagctactaccaagactaccgctgctgctgtctctcaaatcggtgatggtcaagttcaagcaactaccaaaaccactgccgcagctgtttcccaaattactgacggtcaagttcaagccactacaaaaaccactcaagcagccagccaagtaagcgatggccaagtccaagctactactgctacttccgcttctgcagccgctacctccactgacccagtcgatgctgtctcctgtaagacttctggtacc

SEQ ID NO: 141 - DNA, 699 bp, Artificial Sequence
  source: /note="Description of Artificial Sequence: Synthetic polynucleotide"
atgcaatataaaaagccattagtcgtctccgctttagctgctacatctttagctgcctatgctccaaaggacccgtggtccactttaactccatcagctacttacaagggtggtataacagattactcttcgagtttcggtattgctattgaagccgtggctaccagtgcttcctccgtcgcctcatctaaagcaaagagagccgcctatcagataggtgatggtcaagtacaggctgccactactactgctgctgtttctaagaaatccaccgctgctgctgtttctcaaataactgacggtcaagttcaagctgctaagtctactgccgctgctgtttcccaaataactgacggtcaagttcaagctgctaagtctactgccgctgccgtttctcaaataactgacggtcaagttcaagctgctaagtctactgccgctgccgtttctcaaataactgatggtcaagttcaagctgccaagtctactgctgccgctgcctctcagatttctgacgaccaagttcaggccactacctatactaaggctgctgcatcccaaattacagatgggcagatacaagcatctaaaactaccagtggcgctagtcaagtaagtgatggccaagtccaggctactgctgaagtgaaagacgctaacgatccagtcgatgttgtttcctgtaataacaatagtacc

SEQ ID NO: 142 - DNA, 699 bp, Artificial Sequence
  source: /note="Description of Artificial Sequence: Synthetic polynucleotide"
atgcaatataaaaagccattagtcgtctccgctttagctgctacatctttagctgcctatgctccaaaggacccgtggtccactttaactccatcagctacttacaagggtggtataacagattactcttcgagtttcggtattgctattgaagccgtggctaccagtgcttcctccgtcgcctcatctaaagcaaagagagccgcctctcagataggtgatggtcaagtacaggctgccactactactgctgctgtttctaagaaatccaccgctgctgctgtttctcaaataactgacggtcaagttcaagctgctaagtctactgccgctgctgtttcccaaataactgacggtcaagttcaagctgctaagtctactgccgctgccgtttctcaaataactgacggtcaagttcaagctgctaagtctactgccgctgccgtttctcaaataactgatggtcaagttcaagctgccaagtctactgctgccgctgcctctcagatttctgacggccaagttcaggccactacctctactaaggctgctgcatcccaaattacagatgggcagatacaagcatctaaaactaccagtggcgctagtcaagtaagtgatggccaagtccaggctactgctgaagtgaaagacgctaacgatccagtcgatgttgtttcctgtaataacaatagtacc

SEQ ID NO: 143 - DNA, 702 bp, Artificial Sequence
  source: /note="Description of Artificial Sequence: Synthetic polynucleotide"
atgagatttccttcaatttttactgcagttttattcgcagcatcctccgcattagctgcctatgctccaaaggacccgtggtccactttaactccatcagctacttacaagggtggtataacagattactcttcgagtttcggtattgctattgaagccgtggctaccagtgcttcctccgtcgcctcatctaaagcaaagagagccgcctctcagataggtgatggtcaagtacaggctgccactactactgctgctgtttctaagaaatccaccgctgctgctgtttctcaaataactgacggtcaagttcaagctgctaagtctactgccgctgctgtttcccaaataactgacggtcaagttcaagctgctaagtctactgccgctgccgtttctcaaataactgacggtcaagttcaagctgctaagtctactgccgctgccgtttctcaaataactgatggtcaagttcaagctgccaagtctactgctgccgctgcctctcagatttctgacggccaagttcaggccactacctctactaaggctgctgcatcccaaattacagatgggcagatacaagcatctaaaactaccagtggcgctagtcaagtaagtgatggccaagtccaggctactgctgaagtgaaagacgctaacgatccagtcgatgttgtttcctgtaataacaatagtacc

SEQ ID NO: 144 - DNA, 54 bp, Artificial Sequence
  source: /note="Description of Artificial Sequence: Synthetic oligonucleotide"
atgcaatataaaaagccattagtcgtctccgctttagctgctacatctttagct

SEQ ID NO: 145 - DNA, 987 bp, Artificial Sequence
  source: /note="Description of Artificial Sequence: Synthetic polynucleotide"
atgcaatacaaaaagactttggttgcctctgctttggccgctactacattggccgcctatgctccatctgagccttggtcaactttgactccaacagccacttacagcggtggtgttaccgactacgcttccaccttcggtattgccgttcaacaaatctccactacatccagcgcatcatctgcagccaccacagcctcatctaaggccaagagagctgcttcccaaattggtgatggtcaagtccaagctgctaccactactgcttctgtctctaccaagagtaccgctgccgccgtttctcagatcggtgatggtcaaatccaagctactactaagactaccgctgctgctgtctctcaaattggtgatggtcaaattcaagctaccaccaagactacctctgctaagactaccgccgctgccgtttctcaaatcagtgatggtcaaatccaagctaccaccactactttagccccaaagagcaccgctgctgccgtttctcaaatcggtgatggtcaagttcaagctaccaccactactttagccccaaagagcaccgctgctgccgtttctcaaatcggtgatggtcaagttcaagctactactaagactaccgctgctgctgtctctcaaattggtgatggtcaagttcaagctaccaccaagactactgctgccgccgtttctcaaatcggtgatggtcaagttcaagctactaccaagactaccgctgctgctgtctctcaaatcggtgatggtcaagttcaagcaactaccaaaaccactgccgcagctgtttcccaaattactgacggtcaagttcaagccactacaaaaaccactcaagcagccagccaagtaagcgatggccaagtccaagctactactgctacttccgcttctgcagccgctacctccactgacccagtcgatgctgtctcctgtaagacttctggtaccttggagaaaagagaggctgaagca

SEQ ID NO: 146 - DNA, 987 bp, Artificial Sequence
  source: /note="Description of Artificial Sequence: Synthetic polynucleotide"
atgcaatacaaaaagactttggttgcctctgctttggccgctactacattggccgcctatgctccatctgagccttggtccactttgactccaacagccacttacagcggtggtgttaccgactacgcttccaccttcggtattgccgttcaaccaatctccactacatccagcgcatcatctgcagccaccacagcctcatctaaggccaagagagctgcttcccaaattggtgatggtcaagtccaagctgctaccactactgcttctgtctctaccaagagtaccgctgccgccgtttctcagatcggtgatggtcaaatccaagctactactaagactaccgctgctgctgtctctcaaatttgtgatggtcaaattcaagctaccaccaagactacctctgctaagactaccgccgctgccgtttctcaaatcagtgatggtcaaatccaagctaccaccactactttagccccaaagagcaccgctgctgccgtttctcaaatcggtgatggtcaagttcaagctaccaccactactttagccccaaagagcaccgctgctgccgtttctcaaatcggtgatggtcaagttcaagctactactaagactaccgctgctgctgtctctcaaattggtgatggtcaagttcaagctaccaccaagactactgctgccgccgtttctcaaatcggtgatggtcaagttcaagctactaccaagactaccgctgctgctgtctctcaaatcggtgatggtcaagttcaagcaactaccaaaaccactgccgcagctgtttcccaaattactgacggtcaagttcaagccactacaaaaaccactcaagcagccagccaagtaagcgatggccaagtccaagctactactgctacttccgcttctgcagccgctacctccactgacccagtcgatgctgtctcctgtaagacttctggtaccttggagaaaagagaggctgaagca

SEQ ID NO: 147 - DNA, 990 bp, Artificial Sequence
  source: /note="Description of Artificial Sequence: Synthetic polynucleotide"
atgagatttccttcaatttttactgcagttttattcgcagcatcctccgcattagctgcctatgctccatctgagccttggtccactttgactccaacagccacttacagcggtggtgttaccgactacgcttccaccttcggtattgccgttcaaccaatctccactacatccagcgcatcatctgcagccaccacagcctcatctaaggccaagagagctgcttcccaaattggtgatggtcaagtccaagctgctaccactactgcttctgtctctaccaagagtaccgctgccgccgtttctcagatcggtgatggtcaaatccaagctactactaagactaccgctgctgctgtctctcaaattggtgatggtcaaattcaagctaccaccaagactacctctgctaagactaccgccgctgccgtttctcaaatcagtgatggtcaaatccaagctaccaccactactttagccccaaagagcaccgctgctgccgtttctcaaatcggtgatggtcaagttcaagctaccaccactactttagccccaaagagcaccgctgctgccgtttctcaaatcggtgatggtcaagttcaagctactactaagactaccgctgctgctgtctctcaaattggtgatggtcaagttcaagctaccaccaagactactgctgccgccgtttctcaaatcggtgatggtcaagttcaagctactaccaagactaccgctgctgctgtctctcaaatcggtgatggtcaagttcaagcaactaccaaaaccactgccgcagctgtttcccaaattactgacggtcaagttcaagccactacaaaaaccactcaagcagccagccaagtaagcgatggccaagtccaagctactactgctacttccgcttctgcagccgctacctccactgacccagtcgatgctgtctcctgtaagacttctggtaccttggagaaaagagaggctgaagca

SEQ ID NO: 148 - DNA, 723 bp, Artificial Sequence
  source: /note="Description of Artificial Sequence: Synthetic polynucleotide"
atgcaatataaaaagccattagtcgtctccgctttagctgctacatctttagctgcctatgctccaaaggacccgtggtccactttaactccatcagctacttacaagggtggtataacagattactcttcgagtttcggtattgctattgaagccgtggctaccagtgcttcctccgtcgcctcatctaaagcaaagagagccgcctctcagataggtgatggtcaagtacaggctgccactactactgctgctgtttctaagaaatccaccgctgctgctgtttctcaaataactgacggtcaagttcaagctgctaagtctactgccgctgctgtttcccaaataactgacggtcaagttcaagctgctaagtctactgccgctgccgtttctcaaataactgacggtcaagttcaagctgctaagtctactgccgctgccgtttctcaaataactgatggtcaagttcaagctgccaagtctactgctgccgctgcctctcagatttctgacggccaagttcaggccactacctctactaaggctgctgcatcccaaattacagatgggcagatacaagcatctaaaactaccagtggcgctagtcaagtaagtgatggccaagtccaggctactgctgaagtgaaagacgctaacgatccagtcgatgttgtttcctgtaataacaatagtaccttggagaaaagagaggctgaagca

SEQ ID NO: 149 - DNA, 807 bp, Artificial Sequence
  source: /note="Description of Artificial Sequence: Synthetic polynucleotide"
atgcaatataaaaagccattagtcgtctccgctttagctgctacatctttagctgcctatgctccaaaggacccgtggtccactttaactccatcagctacttacaagggtggtataacagattactcttcgagtttcggtattgctattgaagccgtggctaccagtgcttcctccgtcgcctcatctaaagcaaagagagccgcctctcagataggtgatggtcaagtacaggctgccactactactgctgctgtttctaagaaatccaccgctgctgctgtttctcaaataactgacggtcaagttcaagctgctaagtctactgccgctgctgtttcccaaataactgacggtcaagttcaagctgctaagtctacttccgctgccgtttctcaaataactgacggtcaagttcaagctgctaagtctactgccgctgccgtttctcaaataactgatggtcaagttcaagctgccaagtctactgctgccgctgcctctcagatttctgacggccaagttcaggccactacctctactaaggctgctgcatcccaaattacagatgggcagatacaagcatctaaaactaccagtggcgctagtcaagtaagtgatggccaagtccaggctactgctgaagtgaaagacgctaacgatccagtcgatgttgtttcctgtaataacaatagtaccttggagaaaagagaggctgaagcaatgaactgctccgcattctctttctggttcgtctgtaaaataatcttcttcttcttgtccttcaacatccaaatctccatcgca

SEQ ID NO: 150 - DNA, 2271 bp, Artificial Sequence
  source: /note="Description of Artificial Sequence: Synthetic polynucleotide"
atgcaatataaaaagccattagtcgtctccgctttagctgctacatctttagctgcctatgctccaaaggacccgtggtccactttaactccatcagctacttacaagggtggtataacagattactcttcgagtttcggtattgctattgaagccgtggctaccagtgcttcctccgtcgcctcatctaaagcaaagagagccgcctctcagataggtgatggtcaagtacaggctgccactactactgctgctgtttctaagaaatccaccgctgctgctgtttctcaaataactgacggtcaagttcaagctgctaagtctactgccgctgctgtttcccaaataactgacggtcaagttcaagctgctaagtctactgccgctgccgtttctcaaataactgacggtcaagttcaagctgctaagtctactgccgctgccgtttctcaaataactgatggtcaagttcaagctgccaagtctactgctgccgctgcctctcagatttctgacggccaagttcaggccactacctctactaaggctgctgcatcccaaattacagatgggcagatacaagcatctaaaactaccagtggcgctagtcaagtaagtgatggccaagtccaggctactgctgaagtgaaagacgctaacgatccagtcgatgttgtttcctgtaataacaatagtaccaatattcaaacttcaatcgctaacccaagagaaaatttcttgaagtgtttctctcaatacattccaaataatgcaacaaatttgaaattggtttatactcaaaataatccattatacatgtctgttttaaattctacaattcataatttgagattttcttcagatactacaccaaaaccattggttattgttacaccatctcatgtttcacatatccaaggtactatcttgtgttctaagaaagttggtttgcaaattagaactagatcaggtggtcatgattcagaaggcatgtcttacatctcacaagttccattcgttatcgttgatttgagaaacatgagatcaattaaaattgatgttcattcacaaacagcttgggttgaagctggtgcaactttgggtgaagtttactactgggttaacgaaaagaatgaatctttatcattggctgctggttactgtccaacagtttgtgctggtggtcattttggtggtggtggttatggtccattaatgagatcctatggtttggctgctgataacatcatcgatgcacatttggttaacgttcatggtaaagttttggatagaaagtctatgggtgaagatttgttttgggctttgagaggtggtggtgctgaatcatttggtatcatcgttgcttggaagatcagattggttgcagttccaaaatctactatgttctcagttaagaaaattatggaaatccatgaattagttaaattggttaataagtggcaaaatattgcttataaatacgataaagatttgttattgatgactcattttattacaagaaatattactgataaccaaggtaaaaataagacagctatccatacttacttttcttcagttttcttgggtggtgttgattctttggttgatttgatgaataagtcttttccagaattaggtattaagaaaactgattgtagacaattgtcttggatcgatactatcattttctattcaggtgttgttaactacgatacagataacttcaataaggaaattttattggatagatcagctggtcaaaatggtgcttttaaaattaaattggattacgttaagaaaccaattccagaatcagttttcgttcaaattttagaaaaattgtatgaagaagatattggtgctggcatgtacgcattgtatccatacggtggtatcatggatgaaatttctgaatcagctattccatttccacatagagcaggtattttatacgaattgtggtacatttgttcttgggaaaagcaagaagataacgaaaaacatttgaactggattagaaacatctataacttcatgactccatacgtttcacaaaacccaagattggcttatttgaactacagagatttggatatcggtattaatgatcctaaaaatccaaacaactatacacaagcaagaatttggggtgaaaagtacttcggtaaaaatttcgatagattggttaaggttaaaactttggttgatccaaataatttctttagaaatgaacaatctattccaccattgccaagacatagacattga

SEQ ID NO: 151 - protein, 756 aa, Artificial Sequence
  source: /note="Description of Artificial Sequence: Synthetic polypeptide"
MQYKKPLVVSALAATSLAAYAPKDPWSTLTPSATYKGGITDYSSSFGIAIEAVATSASSVASSKAKRAASQIGDGQVQAATTTAAVSKKSTAAAVSQITDGQVQAAKSTAAAVSQITDGQVQAAKSTAAAVSQITDGQVQAAKSTAAAVSQITDGQVQAAKSTAAAASQISDGQVQATTSTKAAASQITDGQIQASKTTSGASQVSDGQVQATAEVKDANDPVDVVSCNNNSTNIQTSIANPRENFLKCFSQYIPNNATNLKLVYTQNNPLYMSVLNSTIHNLRFSSDTTPKPLVIVTPSHVSHIQGTILCSKKVGLQIRTRSGGHDSEGMSYISQVPFVIVDLRNMRSIKIDVHSQTAWVEAGATLGEVYYWVNEKNESLSLAAGYCPTVCAGGHFGGGGYGPLMRSYGLAADNIIDAHLVNVHGKVLDRKSMGEDLFWALRGGGAESFGIIVAWKIRLVAVPKSTMFSVKKIMEIHELVKLVNKWQNIAYKYDKDLLLMTHFITRNITDNQGKNKTAIHTYFSSVFLGGVDSLVDLMNKSFPELGIKKTDCRQLSWIDTIIFYSGVVNYDTDNFNKEILLDRSAGQNGAFKIKLDYVKKPIPESVFVQILEKLYEEDIGAGMYALYPYGGIMDEISESAIPFPHRAGILYELWYICSWEKQEDNEKHLNWIRNIYNFMTPYVSQNPRLAYLNYRDLDIGINDPKNPNNYTQARIWGEKYFGKNFDRLVKVKTLVDPNNFFRNEQSIPPLPRHRH

SEQ ID NO: 152 - protein, 523 aa, Artificial Sequence
  source: /note="Description of Artificial Sequence: Synthetic polypeptide"
NIQTSIANPRENFLKCFSQYIPNNATNLKLVYTQNNPLYMSVLNSTIHNLRFSSDTTPKPLVIVTPSHVSHIQGTILCSKKVGLQIRTRSGGHDSEGMSYISQVPFVIVDLRNMRSIKIDVHSQTAWVEAGATLGEVYYWVNEKNESLSLAAGYCPTVCAGGHFGGGGYGPLMRSYGLAADNIIDAHLVNVHGKVLDRKSMGEDLFWALRGGGAESFGIIVAWKIRLVAVPKSTMFSVKKIMEIHELVKLVNKWQNIAYKYDKDLLLMTHFITRNITDNQGKNKTAIHTYFSSVFLGGVDSLVDLMNKSFPELGIKKTDCRQLSWIDTIIFYSGVVNYDTDNFNKEILLDRSAGQNGAFKIKLDYVKKPIPESVFVQILEKLYEEDIGAGMYALYPYGGIMDEISESAIPFPHRAGILYELWYICSWEKQEDNEKHLNWIRNIYNFMTPYVSQNPRLAYLNYRDLDIGINDPKNPNNYTQARIWGEKYFGKNFDRLVKVKTLVDPNNFFRNEQSIPPLPRHRH

SEQ ID NO: 153 - protein, 523 aa, Artificial Sequence
  source: /note="Description of Artificial Sequence: Synthetic polypeptide"
NIQTSIANPRENFLKCFSQYIPNNATNLKLVYTQNNPLYMSVLNSTIHNLRFSSDTTPKPLVIVTPSHVSHIQGTILCSKKVGLQIRTRSGGHDSEGMSYISQVPFVIVDLRNMRSIKIDVHSQTAWVEAGATLGEVYYWVNEKNESLSLAAGYCPTVCAGGHFGGGGYGPLMRSYGLAADNIIDAHLVNVHGKVLDRKSMGEDLFWALRGGGAENFGIIVAWKIRLVAVPKSTMFSVKKIMEIHELVKLVNKWQNIAYKYDKDLLLMTHFITRNITDNQGKNKTAIHTYFSSVFLGGVDSLVDLMNKSFPELGIKKTDCRQLSWIDTIIFYSGVVNYDTDNFNKEILLDRSAGQNGAFKIKLDYVKKPIPESVFVQILEKLYEEDIGAGMYALYPYGGIMDEISESAIPFPHRAGILYELWYICSWEKQEDNEKHLNWIRNIYNFMTPYVSQNPRLAYLNYRDLDIGINDPKNPNNYTQARIWGEKYFGKNFDRLVKVKTLVDPNNFFRNEQSIPPLPRHRH

SEQ ID NO: 154 - protein, 523 aa, Artificial Sequence
  source: /note="Description of Artificial Sequence: Synthetic polypeptide"
NIQTSIANPRENFLKCFSQYIPNNATNLKLVYTQNNPLYMSVLNSTIHNLRFSSDTTPKPLVIVTPSHVSHIQATILCSKKVGLQIRTRSGGHDSEGMSYISQVPFVIVDLRNMRSIKIDVHSQTAWVEAGATLGEVYYWVNEKNESLSLAAGYCPTVCAGGHFGGGGYGPLMRSYGLAADNIIDAHLVNVHGKVLDRKSMGEDLFWALRGGGAESFGIIVAWKIRLVAVPKSTMFSVKKIMEIHELVKLVNKWQNIAYKYDKDLLLMTHFITRNITDNQGKNKTAIHTYFSSVFLGGVDSLVDLMNKSFPELGIKKTDCRQLSWIDTIIFYSGVVNYDTDNFNKEILLDRSAGQNGAFKIKLDYVKKPIPESVFVQILEKLYEEDIGAGMYALYPYGGIMDEISESAIPFPHRAGILYELWYICSWEKQEDNEKHLNWIRNIYNFMTPYVSQNPRLAYLNYRDLDIGINDPKNPNNYTQARIWGEKYFGKNFDRLVKVKTLVDPNNFFRNEQSIPPLPRHRH

SEQ ID NO: 155 - protein, 523 aa, Artificial Sequence
  source: /note="Description of Artificial Sequence: Synthetic polypeptide"
NIQTSIANPRENFLKCFSQYIPNNATNLKLVYTQNNPLYMSVLNSTIHNLRFSSDTTPKPLVIVTPSHVSHIQGTILCSKKVGLQIRTRSGGHDSEGMSYISQVPFVIVDLRNMRSIKIDVHSQTAWVEAGATLGEVYYWVNEKNESLSLAAGYCPTVCAGGHFGGGGYGPLMRSYGLAADNIIDAHLVNVDGKVLDRKSMGEDLFWALRGGGAESFGIIVAWKIRLVAVPKSTMFSVKKIMEIHELVKLVNKWQNIAYKYDKDLLLMTHFITRNITDNQGKNKTAIHTYFSSVFLGGVDSLVDLMNKSFPELGIKKTDCRQLSWIDTIIFYSGVVNYDTDNFNKEILLDRSAGQNGAFKIKLDYVKKPIPESVFVQILEKLYEEDIGAGMYALYPYGGIMDEISESAIPFPHRAGILYELWYICSWEKQEDNEKHLNWIRNIYNFMTPYVSQNPRLAYLNYRDLDIGINDPKNPNNYTQARIWGEKYFGKNFDRLVKVKTLVDPNNFFRNEQSIPPLPRHRH

SEQ ID NO: 156 - protein, 524 aa, Artificial Sequence
  source: /note="Description of Artificial Sequence: Synthetic polypeptide"
NIQTSIANPRENFLKCFSQYIPNNATNLKLVYTQNNPLYMSVLNSTIHNLRFSSDTTPKPLVIVTPSHVSHIQGTILCSKKVGLQIRTRSGGHDSEGMSYISQVPFVIVDLRNMRSIKIDVHSQTAWVEAGATLGEVYYWVNEKNESLSLAAGYCPTVCAGGHFGGGGYGPLMRSYGLAADNIIDAHLVNVHGKVLDRKSMGEDLFWALRGGGAESFGIIVAWKIRLVAVPSKSTMFSVKKIMEIHELVKLVNKWQNIAYKYDKDLLLMTHFITRNITDNQGKNKTAIHTYFSSVFLGGVDSLVDLMNKSFPELGIKKTDCRQLSWIDTIIFYSGVVNYDTDNFNKEILLDRSAGQNGAFKIKLDYVKKPIPESVFVQILEKLYEEDIGAGMYALYPYGGIMDEISESAIPFPHRAGILYELWYICSWEKQEDNEKHLNWIRNIYNFMTPYVSQNPRLAYLNYRDLDIGINDPKNPNNYTQARIWGEKYFGKNFDRLVKVKTLVDPNNFFRNEQSIPPLPRHRH

SEQ ID NO: 157 - protein, 523 aa, Artificial Sequence
  source: /note="Description of Artificial Sequence: Synthetic polypeptide"
NIQTSIANPRENFLKCFSQYIPNNATNLKLVYTQNDPLYMSVLNSTIHNLRFSSDTTPKPLVIVTPSHVSHIQGTILCSKKVGLQIRTRSGGHDSEGMSYISQVPFVIVDLRNMRSIKIDVHSQTAWVEAGATLGEVYYWVNEKNESLSLAAGYCPTVCAGGHFGGGGYGPLMRSYGLAADNIIDAHLVNVHGKVLDRKSMGEDLFWALRGGGAESFGIIVAWKIRLVAVPKSTMFSVKKIMEIHELVKLVNKWQNIAYKYDKDLLLMTHFITRNITDNQGKNKTAIHTYFSSVFLGGVDSLVDLMNKSFPELGIKKTDCRQLSWIDTIIFYSGVVNYDTDNFNKEILLDRSAGQNGAFKIKLDYVKKPIPESVFVQILEKLYEEDIGAGMYALYPYGGIMDEISESAIPFPHRAGILYELWYICSWEKQEDNEKHLNWIRNIYNFMTPYVSQNPRLAYLNYRDLDIGINDPKNPNNYTQARIWGEKYFGKNFDRLVKVKTLVDPNNFFRNEQSIPPLPRHRH

SEQ ID NO: 158 - protein, 523 aa, Artificial Sequence
  source: /note="Description of Artificial Sequence: Synthetic polypeptide"
NIQTSIANPRENFLKCFSQYIPNNATNLKLVYTQNNPLYMSVLNSTIHNLRFSSDTTPKPLVIVTPSHVSHIQGTILCSKKVGLQIRTRSGGHDSEGMSYISQVPFVIVDLRNMRSIKIDVHSQTAWVEAGATLGEVYYWVNEKNESLSLAAGYCPTVCAGGHFGGGGYGPLMRSYGLAADNIIDAHLVNVHGKVLDRKSMGEDLFWALRGGGAESFGIIAAWKIRLVAVPKSTMFSVKKIMEIHELVKLVNKWQNIAYKYDKDLLLMTHFITRNITDNQGKNKTAIHTYFSSVFLGGVDSLVDLMNKSFPELGIKKTDCRQLSWIDTIIFYSGVVNYDTDNFNKEILLDRSAGQNGAFKIKLDYVKKPIPESVFVQILEKLYEEDIGAGMYALYPYGGIMDEISESAIPFPHRAGILYELWYICSWEKQEDNEKHLNWIRNIYNFMTPYVSQNPRLAYLNYRDLDIGINDPKNPNNYTQARIWGEKYFGKNFDRLVKVKTLVDPNNFFRNEQSIPPLPRHRH

SEQ ID NO: 159 - protein, 523 aa, Artificial Sequence
  source: /note="Description of Artificial Sequence: Synthetic polypeptide"
NIQTSIANPRENFLKCFSQYIPNNATNLKLVYTQNNPLYMSVLNSTIHNLRFSSDTTPKPLVIVTPSHVSHIQGTILCSKKVGLQIRTRSGGHDSEGMSYISQVPFVIVDLRNMRSIKIDVHSQTAWVEAGATLGEVYYWVNEKNESLSLAAGYCPTVCAGGHFGGGGYGPLMRSYGLAADNIIDAHLVNVHGKVLDRKSMGEDLFWALRGGGAESFGIIVAWKIRLVAVPKSTIFSVKKIMEIHELVKLVNKWQNIAYKYDKDLLLMTHFITRNITDNQGKNKTAIHTYFSSVFLGGVDSLVDLMNKSFPELGIKKTDCRQLSWIDTIIFYSGVVNYDTDNFNKEILLDRSAGQNGAFKIKLDYVKKPIPESVFVQILEKLYEEDIGAGMYALYPYGGIMDEISESAIPFPHRAGILYELWYICSWEKQEDNEKHLNWIRNIYNFMTPYVSQNPRLAYLNYRDLDIGINDPKNPNNYTQARIWGEKYFGKNFDRLVKVKTLVDPNNFFRNEQSIPPLPRHRH

SEQ ID NO: 160 - protein, 523 aa, Artificial Sequence
  source: /note="Description of Artificial Sequence: Synthetic polypeptide"
NIQTSIANPRENFLKCFSQYIPNNATNLKLVYTQNNPLYMSVLNSTIHNLRFSSDTTPKPLVIVTPSHVSHIQGTILCSKKVGLQIRTRSGGHDSEGMSYISQVPFVIVDLRNMRSIKIDVHSQTAWVEAGATLGEVYYWVNEKNESLSLAAGYCPTVCAGGHFGGGGYGPLMRSYGLAADNIIDAHLVNVHGKVLDRKSMGEDLFWALRGGGAESFGIIVAWKIRLVAVPKSTMFSVKKIMEIHELVKLVNKWQNIAYKYDKDLLLMTHFITRNITDNQGKNKTAIHTYFSSVFLGGVDSLVDLMNKSFPELGIKKTDCRQLSWIDTIIFYSGVVNYDTDNFNKEILLDRSAGQNGAFKIKLDYVKKPIPESVFVQILEKLYEEDIGAGMYALYPYGGIMDEISESAIPFPHRAGILYELWYICSWEKQEDNEKHLNWIRNIYNFMTPYVSQNPRLAYLNYRDLDLGINDPKNPNNYTQARIWGEKYFGKNFDRLVKVKTLVDPNNFFRNEQSIPPLPRHRH

SEQ ID NO: 161 - protein, 523 aa, Artificial Sequence
  source: /note="Description of Artificial Sequence: Synthetic polypeptide"
NIQTSIANPRENFLKCFSQYIPNNATNLKLVYTQNNPLYMSVLNSTIHNLRFSSDTTPKPLVIVTPSHVSHIQGTILCSKKVGLQIRTRSGGHDSEGMSYISQVPFVIVDLRNMRSIKIDVHSQTAWVEAGATLGEVYYWVNEKNESLSLAAGYCPTVCAGGHFGGGGYGPLMRSYGLAADNIIDAHLVNVHGKVLDRKSMGEDLFWALRGGGAESFGIIVAWKIRLVAVPKSTMFSVKKIMEIHELVKLVNKWQNIAYKYDKDLLLMTHFITRNITDNQGKNKTAIHTYFSSVFLGGVDSLVDLMNKSFPELGIKKTDCRQLSWIDTIIFYSGVVNFDTDNFNKEILLDRSAGQNGAFKIKLDYVKKPIPESVFVQILEKLYEEDIGAGMYALYPYGGIMDEISESAIPFPHRAGILYELWYICSWEKQEDNEKHLNWIRNIYNFMTPYVSQNPRLAYLNYRDLDIGINDPKNPNNYTQARIWGEKYFGKNFDRLVKVKTLVDPNNFFRNEQSIPPLPRHRH

SEQ ID NO: 162 - protein, 523 aa, Artificial Sequence
  source: /note="Description of Artificial Sequence: Synthetic polypeptide"
NIQTSIANPRENFLKCFSQYIPNNATNLKLVYTQNNPLYMSVLNSTIHNLRFSSDTTPKPLVIVTPSHVSHIQGTILCSKKVGLQIRTRSGGHDSEGMSYISQVPFVIVDLRNMRSIKIDVHSQTAWVEAGATLGEVYYWVNEKNESLSLAAGYCPTVCAGGHFGGGGYGPLMRSYGLAADNIIDAHLVNVHGKVLDRKSMGEDLFWAIRGGGAESFGIIVAWKIRLVAVPKSTMFSVKKIMEIHELVKLVNKWQNIAYKYDKDLLLMTHFITRNITDNQGKNKTAIHTYFSSVFLGGVDSLVDLMNKSFPELGIKKTDCRQLSWIDTIIFYSGVVNYDTDNFNKEILLDRSAGQNGAFKIKLDYVKKPIPESVFVQILEKLYEEDIGAGMYALYPYGGIMDEISESAIPFPHRAGILYELWYICSWEKQEDNEKHLNWIRNIYNFMTPYVSQNPRLAYLNYRDLDIGINDPKNPNNYTQARIWGEKYFGKNFDRLVKVKTLVDPNNFFRNEQSIPPLPRHRH

SEQ ID NO: 163 - protein, 523 aa, Artificial Sequence
  source: /note="Description of Artificial Sequence: Synthetic polypeptide"
NIQTSIANPRENFLKCFSQYIPNNATNLKLVYTQNNPLYMSVLNSTIHNLRFSSDTTPKPLVIVTPSHVSHIQGTILCSKKVGLQIRTRSGGHDAEGMSYISQVPFVIVDLRNMRSIKIDVHSQTAWVEAGATLGEVYYWVNEKNESLSLAAGYCPTVCAGGHFGGGGYGPLMRSYGLAADNIIDAHLVNVHGKVLDRKSMGEDLFWALRGGGAESFGIIVAWKIRLVAVPKSTMFSVKKIMEIHELVKLVNKWQNIAYKYDKDLLLMTHFITRNITDNQGKNKTAIHTYFSSVFLGGVDSLVDLMNKSFPELGIKKTDCRQLSWIDTIIFYSGVVNYDTDNFNKEILLDRSAGQNGAFKIKLDYVKKPIPESVFVQILEKLYEEDIGAGMYALYPYGGIMDEISESAIPFPHRAGILYELWYICSWEKQEDNEKHLNWIRNIYNFMTPYVSQNPRLAYLNYRDLDIGINDPKNPNNYTQARIWGEKYFGKNFDRLVKVKTLVDPNNFFRNEQSIPPLPRHRH

SEQ ID NO: 164 - protein, 523 aa, Artificial Sequence
  source: /note="Description of Artificial Sequence: Synthetic polypeptide"
NIQTSIANPRENFLKCFSQYIPNNATNLKLVYTQNNPLYMSVLNSTIHNLRFSSDTTPKPLVIVTPSHVSHIQGTILCSKKVGLQIRTRSGGHDSEGMSYISQVPFVIVDLRNMRSIKIDVHSQTAWVEAGATLGEVYYWVNEKNESLSLAAGYCPTVCAGGHFGGGGYGPLMRSYGLAADNIIDAHLVNVHGKVLDRKSMGEDLFWALRGGGAESFGIIVAWKIRLVAVPKSTMFSVKKIMEIHELVKLVNKWQNIAYKYDKDLLLMTHFITRNITDNQGKNKTAIHTYFSSVFLGGVDSLVDLMNKSFPELGIKKTDCRQLSWIDTIIFYSGVVNYDTDNFNKEILLDRSAGQNGAFKIKLDYVKKPIPESVFVQILEKLYEEDVGAGMYALYPYGGIMDEISESAIPFPHRAGILYELWYICSWEKQEDNEKHLNWIRNIYNFMTPYVSQNPRLAYLNYRDLDIGINDPKNPNNYTQARIWGEKYFGKNFDRLVKVKTLVDPNNFFRNEQSIPPLPRHRH

SEQ ID NO: 165 - protein, 523 aa, Artificial Sequence
  source: /note="Description of Artificial Sequence: Synthetic polypeptide"
NIQTSIANPRENFLKCFSQYIPNNATNLKLVYTQNNPLYMSVLNSTIHNLRFSSDTTPKPLVIVTPSHVSHIQGTILCSKKVGLQIRTRSGGHDSEGMSYISQVPFVIVDLRNMRSIKIDVHSQTAWVEAGATLGEVYYWVNEKNESLSLAAGYCPTVCAGGHFGGGGYGPLMRSYGLAADNIIDAHLVNVHGKVLDRKSMGEDLFWALRGGGAESFGIIVAWKIRLVAVPKSTMFSVKKIMEIHELVKLVNKWQNIAYKYDKDLLLMTHFITRNITDNQGKNKTAIHTYFSSVFLGGVDSLVDLMNKSFPELGIKKTDCRQLSWIDTIIFYSGVVNYDTDNFNKEILLDRSAGQNGAFKIKLDYVKKPIPESVFVQILEKLYEEDIGAGMYALYPYGGIMDEISESAIPFPHRAGILYELWYICSWEKQEDNEKHLNWIRNVYNFMTPYVSQNPRLAYLNYRDLDIGINDPKNPNNYTQARIWGEKYFGKNFDRLVKVKTLVDPNNFFRNEQSIPPLPRHRH

SEQ ID NO: 166 - protein, 523 aa, Artificial Sequence
  source: /note="Description of Artificial Sequence: Synthetic polypeptide"
NIQTSIANPRENFLKCFSEYIPNNATNLKLVYTQNNPLYMSVLNSTIHNLRFSSDTTPKPLVIVTPSHVSHIQGTILCSKKVGLQIRTRSGGHDSEGMSYISQVPFVIVDLRNMRSIKIDVHSQTAWVEAGATLGEVYYWVNEKNESLSLAAGYCPTVCAGGHFGGGGYGPLMRSYGLAADNIIDAHLVNVHGKVLDRKSMGEDLFWALRGGGAESFGIIVAWKIRLVAVPKSTMFSVKKIMEIHELVKLVNKWQNIAYKYDKDLLLMTHFITRNITDNQGKNKTAIHTYFSSVFLGGVDSLVDLMNKSFPELGIKKTDCRQLSWIDTIIFYSGVVNYDTDNFNKEILLDRSAGQNGAFKIKLDYVKKPIPESVFVQILEKLYEEDIGAGMYALYPYGGIMDEISESAIPFPHRAGILYELWYICSWEKQEDNEKHLNWIRNIYNFMTPYVSQNPRLAYLNYRDLDIGINDPKNPNNYTQARIWGEKYFGKNFDRLVKVKTLVDPNNFFRNEQSIPPLPRHRH

SEQ ID NO: 167 - protein, 523 aa, Artificial Sequence
  source: /note="Description of Artificial Sequence: Synthetic polypeptide"
NIQTSIANPRENFLKCFSQYIPNNATNLKLVYTQNNPLYMSVLNSTIHNLRFSSDTTPKPLVIVTPSHVSHIQGTILCSKKVGLQIRTRSGGHDSEGMSYISQVPFVIVDLRNMRSIKIDVHSQTAWVEAGATLGEVYYWVNEKNESLSLAAGYCPTVGAGGHFGGGGYGPLMRSYGLAADNIIDAHLVNVHGKVLDRKSMGEDLFWALRGGGAESFGIIVAWKIRLVAVPKSTMFSVKKIMEIHELVKLVNKWQNIAYKYDKDLLLMTHFITRNITDNQGKNKTAIHTYFSSVFLGGVDSLVDLMNKSFPELGIKKTDCRQLSWIDTIIFYSGVVNYDTDNFNKEILLDRSAGQNGAFKIKLDYVKKPIPESVFVQILEKLYEEDIGAGMYALYPYGGIMDEISESAIPFPHRAGILYELWYICSWEKQEDNEKHLNWIRNIYNFMTPYVSQNPRLAYLNYRDLDIGINDPKNPNNYTQARIWGEKYFGKNFDRLVKVKTLVDPNNFFRNEQSIPPLPRHRH

SEQ ID NO: 168 - protein, 523 aa, Artificial Sequence
  source: /note="Description of Artificial Sequence: Synthetic polypeptide"
NIQTSIANPRENFLKCFSQYIPNNATNLKLVYTQNNPLYMSVLNSTIHNLRFSSDTTPKPLVIVTPSHVSHIQGTILCSKKVGLQIRTRSGGHDSEGMSYISQVPFVIVDLRNMRSIKIDVHSQTAWVEAGATLGEVYYWVNEKNESLSLAAGYCPTVCAGGHFGGGGYGPLMRSYGLAADNIIDAHLVNVHGKVLDRKSMGEDLFWALRGGGAESFGIIVAWKIKLVAVPKSTMFSVKKIMEIHELVKLVNKWQNIAYKYDKDLLLMTHFITRNITDNQGKNKTAIHTYFSSVFLGGVDSLVDLMNKSFPELGIKKTDCRQLSWIDTIIFYSGVVNYDTDNFNKEILLDRSAGQNGAFKIKLDYVKKPIPESVFVQILEKLYEEDIGAGMYALYPYGGIMDEISESAIPFPHRAGILYELWYICSWEKQEDNEKHLNWIRNIYNFMTPYVSQNPRLAYLNYRDLDIGINDPKNPNNYTQARIWGEKYFGKNFDRLVKVKTLVDPNNFFRNEQSIPPLPRHRH

SEQ ID NO: 169 - protein, 523 aa, Artificial Sequence
  source: /note="Description of Artificial Sequence: Synthetic polypeptide"
NIQTSIANPRENFLKCFSQYIPNNATNLKLVYTQNNPLYMSVLNSTIHNLRFSSDTTPKPLVIVTPSHVSHIQGTILCSKKVGLQIRTRSGGHDSEGMSYISQVPFVVVDLRNMRSIKIDVHSQTAWVEAGATLGEVYYWVNEKNESLSLAAGYCPTVCAGGHFGGGGYGPLMRSYGLAADNIIDAHLVNVHGKVLDRKSMGEDLFWALRGGGAESFGIIVAWKIRLVAVPKSTMFSVKKIMEIHELVKLVNKWQNIAYKYDKDLLLMTHFITRNITDNQGKNKTAIHTYFSSVFLGGVDSLVDLMNKSFPELGIKKTDCRQLSWIDTIIFYSGVVNYDTDNFNKEILLDRSAGQNGAFKIKLDYVKKPIPESVFVQILEKLYEEDIGAGMYALYPYGGIMDEISESAIPFPHRAGILYELWYICSWEKQEDNEKHLNWIRNIYNFMTPYVSQNPRLAYLNYRDLDIGINDPKNPNNYTQARIWGEKYFGKNFDRLVKVKTLVDPNNFFRNEQSIPPLPRHRH

SEQ ID NO: 170 - protein, 523 aa, Artificial Sequence
  source: /note="Description of Artificial Sequence: Synthetic polypeptide"
NIQTSIANPRENFLKCFSQYIPNNATNLKLVYTQNNPLYMSVLNSTIHNLRFSSDTTPKPLVIVTPSHVSHIQGTILCSKKVGLQIRTRSGGHDSEGMSYISQVPFVIVDLRNMRSIKIDVHSQTAWVEAGATLGEVYYWVNEKNESLSLAAGYCPTVCAGGHFGGGGYGPLMRSYGLAADNIIDAHLVNVHGKVLDRKSMGEDLFWALRGGGAESFGIIVAWKIRLVAVPKSTMFSVKKIMEIHELVKLVNKWQNIAYKYDKDLLLMTHFITRNITDNQGKNKTAIHTYFSSVFLGGVDSLVDLMNKSFPELGIKKTDCRQLSWIDTIIFYSGVVNYDTDNFNKEILLDRSAGQNGAFKIKLDYVKKPIPESVFVQILEKLYEEDIGAGMYVLYPYGGIMDEISESAIPFPHRAGILYELWYICSWEKQEDNEKHLNWIRNIYNFMTPYVSQNPRLAYLNYRDLDIGINDPKNPNNYTQARIWGEKYFGKNFDRLVKVKTLVDPNNFFRNEQSIPPLPRHRH

SEQ ID NO: 171 - protein, 523 aa, Artificial Sequence
  source: /note="Description of Artificial Sequence: Synthetic polypeptide"
NIQTSIANPRENFLKCFSQYIPNNATNPKLVYTQNNPLYMSVLNSTIHNLRFSSDTTPKPLVIVTPSHVSHIQGTILCSKKVGLQIRTRSGGHDSEGMSYISQVPFVIVDLRNMRSIKIDVHSQTAWVEAGATLGEVYYWVNEKNESLSLAAGYCPTVCAGGHFGGGGYGPLMRSYGLAADNIIDAHLVNVHGKVLDRKSMGEDLFWALRGGGAESFGIIVAWKIRLVAVPKSTMFSVKKIMEIHELVKLVNKWQNIAYKYDKDLLLMTHFITRNITDNQGKNKTAIHTYFSSVFLGGVDSLVDLMNKSFPELGIKKTDCRQLSWIDTIIFYSGVVNYDTDNFNKEILLDRSAGQNGAFKIKLDYVKKPIPESVFVQILEKLYEEDIGAGMYALYPYGGIMDEISESAIPFPHRAGILYELWYICSWEKQEDNEKHLNWIRNIYNFMTPYVSQNPRLAYLNYRDLDIGINDPKNPNNYTQARIWGEKYFGKNFDRLVKVKTLVDPNNFFRNEQSIPPLPRHRH

SEQ ID NO: 172 - protein, 523 aa, Artificial Sequence
  source: /note="Description of Artificial Sequence: Synthetic polypeptide"
NIQTSIANPRENFLKCFSQYIPNNATNLKLVYTQNNPLYMSVLNSTIHNLRFSSDTTPKPLVIVTPSHVSHIQGTILCSKKVGLQIRTRSGGHDSEGMSYISQVPFVIVDLRNMRSIKIDVHSQTAWVEAGATLGEVYYWVNEKNESLSLAAGYCPTVCAGGHFGGGGYGPLMRSYGLAADNIIDAHLVNVHGKVLDRKSMGEDLFWALRGGGAESFGIIVAWKIRLVAVPKSTMFSVKKIMEIHELVKLVNKWQNIAYKYDKDLLLMTHFITRNITDNQGKNKTAIHTYFSSVFLGGVDSLVDLMNKSFPELGIKKTDCRQLSWIDTIIFYSGVVNYDTDNFNKEILLDRSAGQNTAFKIKLDYVKKPIPESVFVQILEKLYEEDIGAGMYALYPYGGIMDEISESAIPFPHRAGILYELWYICSWEKQEDNEKHLNWIRNIYNFMTPYVSQNPRLAYLNYRDLDIGINDPKNPNNYTQARIWGEKYFGKNFDRLVKVKTLVDPNNFFRNEQSIPPLPRHRH

SEQ ID NO: 173 - protein, 523 aa, Artificial Sequence
  source: /note="Description of Artificial Sequence: Synthetic polypeptide"
NIQTSIANPRENFLKCFSQYIPNNATNLKLVYTQNNPLYMSVLNSTIHNLRFSSDTTPKPLVIVTPSHVSHIQGTILCSKKVGLQIRTRSGGHDSEGMSYISQVPFVIVDLRNMRSIKIDVHSQTAWVEAGATLGEVYYWVNEKNESLSLAAGYCPTVCAGGHFGGGGYGPLMRSYGLAADNIIDAHLVNVHGKVLDRKSMGEDLFWALRGGGAESFGIIVAWKIRLVAVPKSTMFSVKKIMEIHELVKLVNKWQNIAYKYDKDLLLMTHFITRNITDNQGKNKTAIHTYFSSVFLGGVDSLVDLMNKSFPELGIKKTDCRQLSWIDTIIFYSGVVNYDTDNFNKEILLDRSAGQNGAFKIKLDYVKKPIPESVFVQILEKLYEEDIGAGMYALYPYGGIMDEISESAIPFPHRAGILYELWYIASWEKQEDNEKHLNWIRNIYNFMTPYVSQNPRLAYLNYRDLDIGINDPKNPNNYTQARIWGEKYFGKNFDRLVKVKTLVDPNNFFRNEQSIPPLPRHRH

SEQ ID NO: 174 - protein, 523 aa, Artificial Sequence
  source: /note="Description of Artificial Sequence: Synthetic polypeptide"
NIQTSIANPRENFLKCFSQYIPNNATNLKLIYTQNNPLYMSVLNSTIHNLRFSSDTTPKPLVIVTPSHVSHIQGTILCSKKVGLQIRTRSGGHDSEGMSYISQVPFVIVDLRNMRSIKIDVHSQTAWVEAGATLGEVYYWVNEKNESLSLAAGYCPTVCAGGHFGGGGYGPLMRSYGLAADNIIDAHLVNVHGKVLDRKSMGEDLFWALRGGGAESFGIIVAWKIRLVAVPKSTMFSVKKIMEIHELVKLVNKWQNIAYKYDKDLLLMTHFITRNITDNQGKNKTAIHTYFSSVFLGGVDSLVDLMNKSFPELGIKKTDCRQLSWIDTIIFYSGVVNYDTDNFNKEILLDRSAGQNGAFKIKLDYVKKPIPESVFVQILEKLYEEDIGAGMYALYPYGGIMDEISESAIPFPHRAGILYELWYICSWEKQEDNEKHLNWIRNIYNFMTPYVSQNPRLAYLNYRDLDIGINDPKNPNNYTQARIWGEKYFGKNFDRLVKVKTLVDPNNFFRNEQSIPPLPRHRH

SEQ ID NO: 175 - protein, 523 aa, Artificial Sequence
  source: /note="Description of Artificial Sequence: Synthetic polypeptide"
NIQTSIANPRENFLKCFSQYIPNNATNLKLVYTQNNPLYMSVLNSTIHNLRFSSDTTPKPLVIVTPSHVSHIQGTILCSKKVGLQIRTRSGGHDSEGMSYISQVPFVIVDLRNMRSIKIDVHSQTAWVEAGATLGEVYYWVNEKNESLSLAAGYCPTVCAGGHFGGGGYGPLMRSYGLAADNIIDAHLVNVHGKVLDRKSMGEDLFWALRGGGAESFGIIVAWKIRLVAVPKSTMFSVKKIMEIHELVKLVNKWQNIAYKYDKDLLLMTHFITRNITDNQGKNKTAIHTYFSSVFLGGVDSLVDLMNKSFPELGIKKTDCRQLSWIDTIIFYSGVVNYDTDNFNKEILLDRSAGQNGAFKIKLDYVKKPIPESVFVQILEKLYEEDIGVGMYALYPYGGIMDEISESAIPFPHRAGILYELWYICSWEKQEDNEKHLNWIRNIYNFMTPYVSQNPRLAYLNYRDLDIGINDPKNPNNYTQARIWGEKYFGKNFDRLVKVKTLVDPNNFFRNEQSIPPLPRHRH

SEQ ID NO: 176 - protein, 523 aa, Artificial Sequence
  source: /note="Description of Artificial Sequence: Synthetic polypeptide"
NIQTSIANPRENFLKCFSQYIPNNATNLKLVYTQNNPLYMSVLNSTIHNLRFSSDTTPKPLVIVTPSHVSHIQGTILCSKKVGLQIRTRSGGHDSEGMSYISQVPFVIVDLRNMRSIKIDVHSQTAWVEAGATLGEVYYWVNEKNESLSLAAGYCPTVCAGGHFGGGGYGPLMRSYGLAADNIIDAHLVNVHGKVLDRKSMGEDLFWALRGGGAESFGIIVAWKIRLVAVPKSTMFSVKKIMEIHELVKLVNKWQNIAYKYDKDLLLMTHFITRNITDNQGKNKTAIHTYFSSVFLGGVDSLVDLMNKSFPELGIKKTDCRQLSWIDTIIFYSGVVNYDTDNFNKEILLDRSAGQNGAFKIKLDYVKKPIPESVFVQILEKLYEEDIGAGMYALYPYGGIMDEISESAIPFPHRAGILYELWYICSWEKQEDNEKHLNWIRSIYNFMTPYVSQNPRLAYLNYRDLDIGINDPKNPNNYTQARIWGEKYFGKNFDRLVKVKTLVDPNNFFRNEQSIPPLPRHRH

SEQ ID NO: 177 - protein, 523 aa, Artificial Sequence
  source: /note="Description of Artificial Sequence: Synthetic polypeptide"
NIQTSIANPQENFLKCFSQYIPNNATNLKLVYTQNNPLYMSVLNSTIHNLRFSSDTTPKPLVIVTPSHVSHIQGTILCSKKVGLQIRTRSGGHDSEGMSYISQVPFVIVDLRNMRSIKIDVHSQTAWVEAGATLGEVYYWVNEKNESLSLAAGYCPTVCAGGHFGGGGYGPLMRSYGLAADNIIDAHLVNVHGKVLDRKSMGEDLFWALRGGGAESFGIIVAWKIRLVAVPKSTMFSVKKIMEIHELVKLVNKWQNIAYKYDKDLLLMTHFITRNITDNQGKNKTAIHTYFSSVFLGGVDSLVDLMNKSFPELGIKKTDCRQLSWIDTIIFYSGVVNYDTDNFNKEILLDRSAGQNGAFKIKLDYVKKPIPESVFVQILEKLYEEDIGAGMYALYPYGGIMDEISESAIPFPHRAGILYELWYICSWEKQEDNEKHLNWIRNIYNFMTPYVSQNPRLAYLNYRDLDIGINDPKNPNNYTQARIWGEKYFGKNFDRLVKVKTLVDPNNFFRNEQSIPPLPRHRH

SEQ ID NO: 178 - protein, 523 aa, Artificial Sequence
  source: /note="Description of Artificial Sequence: Synthetic polypeptide"
NIQTSIANPRENFLKCFSQYIPNNATNLKLVYTQNNPLYMSVLNSTIHNLRFSSDTTPKPLVIVTPSHVSHIQGTILCSKKVGLQIRTRSGGHDSEGMSYISQVPFVIVDLRNMRSIKIDVHSQTAWVEAGATLGEVYYWVNEKNESLSLAAGYCPTVCAGGHFGGGGYGPLMRSYGLAADNIIDAHLVNVHGKVLDRKSMGEDLFWALRGGGAESFGIIVAWKIRLVAVPKSTMFSVKKIMEIHELVKLVNKWQNIAYKYDKDLLLMTHFITRNITDNQGKNKTAIHTYFSSVFLGGVDSLVDLMNKSFPELGIKKTDCRQLSWIDTIIFYSGVVNYDTDNFNKEILLDRSAGQNGAFKIKLDYVKKPIPESVFVQILEKLYEEDIGAGMYALYPYGGIMDEISESAIPFPHRAGIMYELWYICSWEKQEDNEKHLNWIRNIYNFMTPYVSQNPRLAYLNYRDLDIGINDPKNPNNYTQARIWGEKYFGKNFDRLVKVKTLVDPNNFFRNEQSIPPLPRHRH

SEQ ID NO: 179 - protein, 523 aa, Artificial Sequence
  source: /note="Description of Artificial Sequence: Synthetic polypeptide"
NIQTSIANPRENFLKCFSQYIPNNATNLKLVYTQNNPLYMSVLNSTIQNLRFSSDTTPKPLVIVTPSHVSHIQGTILCSKKVGLQIRTRSGGHDSEGMSYISQVPFVIVDLRNMRSIKIDVHSQTAWVEAGATLGEVYYWVNEKNESLSLAAGYCPTVCAGGHFGGGGYGPLMRSYGLAADNIIDAHLVNVHGKVLDRKSMGEDLFWALRGGGAESFGIIVAWKIRLVAVPKSTMFSVKKIMEIHELVKLVNKWQNIAYKYDKDLLLMTHFITRNITDNQGKNKTAIHTYFSSVFLGGVDSLVDLMNKSFPELGIKKTDCRQLSWIDTIIFYSGVVNYDTDNFNKEILLDRSAGQNGAFKIKLDYVKKPIPESVFVQILEKLYEEDIGAGMYALYPYGGIMDEISESAIPFPHRAGILYELWYICSWEKQEDNEKHLNWIRNIYNFMTPYVSQNPRLAYLNYRDLDIGINDPKNPNNYTQARIWGEKYFGKNFDRLVKVKTLVDPNNFFRNEQSIPPLPRHRH

SEQ ID NO: 180 - protein, 523 aa, Artificial Sequence
  source: /note="Description of Artificial Sequence: Synthetic polypeptide"
NIQTSIANPRENFLKCFSQYIPNNATNLKLVYTQNNPLYMSVLNSTIHNLRFSSDTTPKPLVIVTPSHVSHIQGTILCSKKVGLQIRTRSGGHDSEGMSYISQVPFVIVDLRNMRSIKIDVHSQTAWVEAGATLGEVYYWVNEKNESLSLAAGYCPTVCAGGHFGGGGYGPLMRSYGLAADNIIDAHLVNVHGKVLDRKSMGEDLFWALRGGGAESFGIIVAWKIRLVAVPKSTMFSVKKIMEIHELVKLVNKWQNIAYKYDKDLLLMTHFITRNITDNQGKNKTAIHTYFSSVFLGGVDSLVDLMNKSFPELGIKKTDCKQLSWIDTIIFYSGVVNYDTDNFNKEILLDRSAGQNGAFKIKLDYVKKPIPESVFVQILEKLYEEDIGAGMYALYPYGGIMDEISESAIPFPHRAGILYELWYICSWEKQEDNEKHLNWIRNIYNFMTPYVSQNPRLAYLNYRDLDIGINDPKNPNNYTQARIWGEKYFGKNFDRLVKVKTLVDPNNFFRNEQSIPPLPRHRH

SEQ ID NO: 181 - protein, 523 aa, Artificial Sequence
  source: /note="Description of Artificial Sequence: Synthetic polypeptide"
NIQTSIANPRENFLKCFSQYIPNNATNLKLVYTQNNPLYMSVLNSTIHNLRFSSDTTPKPLVIVTPSHVSHIQGTILCSKKVGLQIRTRSGGHDSEGMSYISQVPFVIVDLRNMRSIKIDVHSQTAWVEAGATLGEVYYWVNEKNESLSLAAGYCPTVCAGGHFGGGGYGPLMRSYGLAADNIIDAHLVNVHGKVLDRKSMGEDLFWALRGGGAESFGIIVAWKIRLVAVPKSTMFSVKKIMEIHELVKLVNKWQNIAYKYDKDLLLMTHFITRNITDNQGKNKTAIHTYFSSVFLGGVDSLVDLMNKSFPELGIKKTDCRQLSWIDTIIFYSGVVNYDTDNFNKEILLDRSAGQNGAFKIKLDYVKKPIPESVFVQILEKLYEEDIGAGMYALYPYGGIMDEISESAIPFPHRAGILYELWYICSWEKQEDNEKHLNWIRNIYNFMTPYVSQNPRLAYLNYRDLDIGINDPENPNNYTQARIWGEKYFGKNFDRLVKVKTLVDPNNFFRNEQSIPPLPRHRH

SEQ ID NO: 182 - protein, 523 aa, Artificial Sequence
  source: /note="Description of Artificial Sequence: Synthetic polypeptide"
NIQTSIANPRENFLKCFSQYIPNNATNLKLVYTQNNPLYMSVLNSTIHNLRFSSDTTPKPLVIVTPSHVSHIQGTILCSKKVGLQIRTRSGGHDSEGMSYISQVPFVIVDLRNMRSIKIDVHSQTAWVEAGATLGEVYYWVNEKNESLSLAAGYCPTVCAGGHFGGGGYGPLMRSYGLAADNIIDAHLVNVHGKVLDRKSMGEDLFWALRGGGAESFGIIVAWKIRLVAVPKSTMFSVKKIMEIHELVKLVNKWQNIAYKYDKDLLLMTHFITRNITDNQGKNKTAIHTYFSSVFLGGVDSLVDLMNKSFPELGIKKTDCRELSWIDTIIFYSGVVNYDTDNFNKEILLDRSAGQNGAFKIKLDYVKKPIPESVFVQILEKLYEEDIGAGMYALYPYGGIMDEISESAIPFPHRAGILYELWYICSWEKQEDNEKHLNWIRNIYNFMTPYVSQNPRLAYLNYRDLDIGINDPKNPNNYTQARIWGEKYFGKNFDRLVKVKTLVDPNNFFRNEQSIPPLPRHRH

SEQ ID NO: 183 - protein, 523 aa, Artificial Sequence
  source: /note="Description of Artificial Sequence: Synthetic polypeptide"
NIQTSIANPRENFLKCFSQYIPNNATNLKLVYTQNNPLYMSVLNSTIHNLRFSSDTTPKPLVIVTPSHVSHIQGTILCSKKVGLQIRTRSGGHDSEGMSYISQVPFVIVDLRNMRSIKIDVHSQTAWVEAGATLGEVYYWVNEKNESLSLAAGYCPTVCAGGHFGGGGYGPLMRSYGLAADNIIDAHLVNVHGKVLDRKSMGEDLFWALRGGGAESFGIIVAWKIRLVAVPKSTMFSVKKIMEIHELVKLVNKWQNIAYKYDKDLLLMTHFITRNITDNQGKNKTAIHTYFSSVFLGGVDSLVDLMNKSFPELGIKKTDCRQLSWIDTIIFYSGVVNYDTDNFNKEILLDRSAGQNGAFKIKLDYVKKPIPESVFVQILEKLYEEDIGAGMYALYPYGGIMDEISESAIPFPHRAGILYELWYICSWEKQEDNEKHLNWIRNIYNFMTPYVSQNPRLAYLNYRDLDIGINDPKNPNNYTQARIWGEKYFGKNFDRLVKVKTLVDPNNFFRNEQSIPPLPRHHH

SEQ ID NO: 184 - protein, 523 aa, Artificial Sequence
  source: /note="Description of Artificial Sequence: Synthetic polypeptide"
NIQTSIANPRENFLKCFSQYIPNNATNLKLVYTQNNPLYMSVLNSTIHNLRFSSDTTPKPLVIVTPSHVSHIQGTILCSKKVGLQIRTRSGGHDSEGMSYISQVPFVIVDLRNMRSIKIDVHSQTAWVEAGATLGEVYYWVNEKNESLSLAAGYCPTVCAGGHFGGGGYGPLMRSYGLAADNIIDAHLVNVHGKVLDRKSMGEDLFWALRGGGAESFGIIVAWKIRLVAVPKSTMFSVKKIMEIHELVKLVNKWQNIAYKYDKDLLLMTHFITRNITDNQGKNKTAIHTYFSSVFLGGVDSLVDLMNKSFPELGIKKTDCRQLSWIDTIIFYSGVVNYDTDNFNKEILLDRSAGQNGAFKIKLDYVKKPIPESVFVQILEKLYEEDIGAGMYALYPYGGIMDEISESAIPFPHRAGILYELWYICSWEKQEDNEKHLNWIRNIYNFMTPYVSQNPRLAYLNYRDLDIGINDPKNPNNYTQARIWGEKYFGKNFDRLVKVKTLVDPNNFFRNEQSIPPLPPHRH

SEQ ID NO: 185 - protein, 523 aa, Artificial Sequence
  source: /note="Description of Artificial Sequence: Synthetic polypeptide"
NIQTSIANPRENFLKCFSQYIPNNATNLKLVYTQNNPLYMSVLNSTIHNLRFSSDTTPKPLVIVTPSHVSHIQGTILCSKKVGLQIRTRSGGHDSEGMSYISQVPFVIVDLRNMRSIKIDVHSQTAWVEAGATLGEVYYWVNEKNESLSLAAGYCPTVCAGGHFGGGGYGPLMRSYGLAADNIIDAHLVNVHGKVLDRKSMGEDLFWALRGGGAESFGIIVAWKIRLVAVPKSTMFSVKKIMEIHELVKLVNKWQNIAYKYDKDLLLMTHFITRNITDNQGKNKTAIHTYFSSVFLGGVDSLVDLMNKSFPELGIKKTDCRQLSWIDTIIFYSGVVNYDTDNFNKEILLDRSAGQNGAFKIKLDYVKKPIPESVFVQILEKLYEEDIGAGMYALYPYGGIMDEISESAIPFPHRAGILYELWYICSWEKQEDNEKHLNWIRNIYNFMTPYVSQNPRLAYLNYRDLDIGINDPKNPNNYTQARIWGEKYFGKNFDRLVKVKTLADPNNFFRNEQSIPPLPRHRH

SEQ ID NO: 186 - protein, 523 aa, Artificial Sequence
  source: /note="Description of Artificial Sequence: Synthetic polypeptide"
NIQTSIANPRENFLKCFSQYIPNNATNLKLVYTQNNPLYMSVLNSTIHNLRFSSDTTPKPLVIVTPSHVSHIQGTILCSKKVGLQIRTRSGGHDSEGMSYISQVPFVIVDLRNMRSIKIDVHSQTAWVEAGATLGEVYYWVNEKNESLSLAAGYCPTVCVGGHFGGGGYGPLMRSYGLAADNIIDAHLVNVHGKVLDRKSMGEDLFWALRGGGAESFGIIVAWKIRLVAVPKSTMFSVKKIMEIHELVKLVNKWQNIAYKYDKDLLLMTHFITRNITDNQGKNKTAIHTYFSSVFLGGVDSLVDLMNKSFPELGIKKTDCRQLSWIDTIIFYSGVVNYDTDNFNKEILLDRSAGQNGAFKIKLDYVKKPIPESVFVQILEKLYEEDIGAGMYALYPYGGIMDEISESAIPFPHRAGILYELWYICSWEKQEDNEKHLNWIRNIYNFMTPYVSQNPRLAYLNYRDLDIGINDPKNPNNYTQARIWGEKYFGKNFDRLVKVKTLVDPNNFFRNEQSIPPLPRHRH

SEQ ID NO: 187 - protein, 523 aa, Artificial Sequence
  source: /note="Description of Artificial Sequence: Synthetic polypeptide"
NIQTSIANPRENFLKCFSQYIPNNATNLKLVYTQNNPLYMSVLNSTIHNLRFTSDTTPKPLVIVTPSHVSHIQGTILCSKKVGLQIRTRSGGHDSEGMSYISQVPFVIVDLRNMRSIKIDVHSQTAWVEAGATLGEVYYWVNEKNESLSLAAGYCPTVCAGGHFGGGGYGPLMRSYGLAADNIIDAHLVNVHGKVLDRKSMGEDLFWALRGGGAESFGIIVAWKIRLVAVPKSTMFSVKKIMEIHELVKLVNKWQNIAYKYDKDLLLMTHFITRNITDNQGKNKTAIHTYFSSVFLGGVDSLVDLMNKSFPELGIKKTDCRQLSWIDTIIFYSGVVNYDTDNFNKEILLDRSAGQNGAFKIKLDYVKKPIPESVFVQILEKLYEEDIGAGMYALYPYGGIMDEISESAIPFPHRAGILYELWYICSWEKQEDNEKHLNWIRNIYNFMTPYVSQNPRLAYLNYRDLDIGINDPKNPNNYTQARIWGEKYFGKNFDRLVKVKTLVDPNNFFRNEQSIPPLPRHRH

SEQ ID NO: 188 - protein, 523 aa, Artificial Sequence
  source: /note="Description of Artificial Sequence: Synthetic polypeptide"
NIQTSIANPRENFLKCFSQYIPNNATNLKLVYTQNNPLYMSVLNSTIHNLRFSSDTTPKPLVIVTPSHVSHIQGTILCSKKVGLQIRTRSGGHDSEGMSYISQVPFVIVDLRNMRSIKIDVHSQTAWVEAGATLGEVYYWVNEKNESLSLAAGYCPTVCAGGHFGGGGYGPLMRSYGLAADNIIDAHLVNVHGKVLDRKSMGEDLFWALRGGGAESFGIIVAWKIRLVAVPKSTMFSVKKIMEIHELVKLVNKWQNIAYKYDKDLLLMTHFITRNITDNQGKNKTAIHTYFSSVFLGGVDSLVDLMNKSFPELGIKKTDCRQLSWIDTIIFYSGVVNYNTDNFNKEILLDRSAGQNGAFKIKLDYVKKPIPESVFVQILEKLYEEDIGAGMYALYPYGGIMDEISESAIPFPHRAGILYELWYICSWEKQEDNEKHLNWIRNIYNFMTPYVSQNPRLAYLNYRDLDIGINDPKNPNNYTQARIWGEKYFGKNFDRLVKVKTLVDPNNFFRNEQSIPPLPRHRH

SEQ ID NO: 189 - protein, 523 aa, Unknown; identical to SEQ ID NO: 152
  source: /note="Description of Unknown: control construct sequence"

SEQ ID NO: 190 - protein, 523 aa, Artificial Sequence
  source: /note="Description of Artificial Sequence: Synthetic polypeptide"
NIQTSIANPRENFLKCFSQYIPNNATNLKLVYTQNNPLYMSVLNSTIHNLRFSSDTTPKPLVIVTPSHVSHIQGTILCSKKVGLQIRTRSGGHDSEGMSYISQVPFVIVDLRNMRSIKIDVHSQTAWVEAGATLGEVYYWVNEKNESLSLAAGYCPTVCAGGHFGGGGYGPLMRSYGLAADNIIDAHLVNVHGKVLDRKSMGEDLFWALRGGGAESFGIIVAWKIRLVAVPKSTMFSVKKIMEIHELVKLVNKWQNIAYKYDKDLLLMTHFITRNITDNQGKNKTAIHTYFSSVFLGGVDSLVDLMNKSFPELGIKKTDCRQLSWIDTIIFYSGVVNYDTDNFNKEILLDRSAGQNGAFKIKLDYVKKPIPESVFVKILEKLYEEDIGAGMYALYPYGGIMDEISESAIPFPHRAGILYELWYICSWEKQEDNEKHLNWIRNIYNFMTPYVSQNPRLAYLNYRDLDIGINDPKNPNNYTQARIWGEKYFGKNFDRLVKVKTLVDPNNFFRNEQSIPPLPRHRH

SEQ ID NO: 191 - protein, 523 aa, Artificial Sequence
  source: /note="Description of Artificial Sequence: Synthetic polypeptide"
NIQTSIANPRENFLKCFSQYIPNNATNLKLVYTQNNPLYMSVLNSTIHNLRFSSDTTPKPLVIVTPSHVSHIQGTILCSKKVGLQIRTRSGGHDSEGMSYISQVPFVIVDLRNMRSIKIDVHSQTAWVEAGATLGEVYYWVNEKNESLSLAAGYCPTVCAGGHFSGGGYGPLMRSYGLAADNIIDAHLVNVHGKVLDRKSMGEDLFWALRGGGAESFGIIVAWKIRLVAVPKSTMFSVKKIMEIHELVKLVNKWQNIAYKYDKDLLLMTHFITRNITDNQGKNKTAIHTYFSSVFLGGVDSLVDLMNKSFPELGIKKTDCRQLSWIDTIIFYSGVVNYDTDNFNKEILLDRSAGQNGAFKIKLDYVKKPIPESVFVQILEKLYEEDIGAGMYALYPYGGIMDEISESAIPFPHRAGILYELWYICSWEKQEDNEKHLNWIRNIYNFMTPYVSQNPRLAYLNYRDLDIGINDPKNPNNYTQARIWGEKYFGKNFDRLVKVKTLVDPNNFFRNEQSIPPLPRHRH

SEQ ID NO: 192 - protein, 523 aa, Artificial Sequence
  source: /note="Description of Artificial Sequence: Synthetic polypeptide"
NIQTSIANPRENFLKCFSQYIPNNATNLKLVYTQNNPLYMSVLNSTIHNLRFSSDTTPKPLVIVTPSHVSHIQGTILCSKKVGLQIRTRSGGHDSEGMSYISQVPFVIVDLRNMRSIKIDVHSQTAWVEAGATLGEVYYWVNEKNESLSLAAGYCPTVCAGGHFGGGGYGPLMRSYGLAADNIIDAHLVNVHGKVLDRKSMGEDLFWALRGGGAESFGIIVAWKIRLVAVPKSTMFSVKKIMEIHELVKLVNKWQNIAYKYDKDLVLMTHFITRNITDNQGKNKTAIHTYFSSVFLGGVDSLVDLMNKSFPELGIKKTDCRQLSWIDTIIFYSGVVNYDTDNFNKEILLDRSAGQNGAFKIKLDYVKKPIPESVFVQILEKLYEEDIGAGMYALYPYGGIMDEISESAIPFPHRAGILYELWYICSWEKQEDNEKHLNWIRNIYNFMTPYVSQNPRLAYLNYRDLDIGINDPKNPNNYTQARIWGEKYFGKNFDRLVKVKTLVDPNNFFRNEQSIPPLPRHRH

SEQ ID NO: 193 - protein, 523 aa, Artificial Sequence
  source: /note="Description of Artificial Sequence: Synthetic polypeptide"
NIQTSIANPRENFLKCFSQYIPNNATNLKLVYTQNNPLYMSVLNSTIHNLRFSSDTTPKPLVIVTPSHVSHIQGTILCSKKVGLQIRTRSGGHDSEGMSYISQVPFVIVDLRNMRSIKIDVHSQTAWVEAGATLGEVYYWVNEKNESLSLAAGYCPTVCAGGHFGGGGYGPLMRSYGLAADNIIDAHLVNVHGKVLDRKSMGEDLFWALRGGGAESFGIIVAWKIRLVAVPKSTMFSVKKIMEIHELVKLVNKWQNIAYKYDKDLLLMTHFITRNITDNHGKNKTAIHTYFSSVFLGGVDSLVDLMNKSFPELGIKKTDCRQLSWIDTIIFYSGVVNYDTDNFNKEILLDRSAGQNGAFKIKLDYVKKPIPESVFVQILEKLYEEDIGAGMYALYPYGGIMDEISESAIPFPHRAGILYELWYICSWEKQEDNEKHLNWIRNIYNFMTPYVSQNPRLAYLNYRDLDIGINDPKNPNNYTQARIWGEKYFGKNFDRLVKVKTLVDPNNFFRNEQSIPPLPRHRH

SEQ ID NO: 194 - protein, 523 aa, Artificial Sequence
  source: /note="Description of Artificial Sequence: Synthetic polypeptide"
NIQTSIANPRENFLKCFSQYIPNNATNLKLVYTQNNPLYMSVLNSTIHNLRFSSDTTPKPLVIVTPSHVSHIQGTILCSKKVGLQIRTRSGGHDSEGMSYISQVPFVIVDLRNMRSIKIDVHSQTAWVEAGATLGEVYYWVNEKNESLSLAAGYCPTVCAGGHFGGGGYGPLMRSYGLAADNIIDAHLVNVHGKVLDRKSMGEDLFWALRGGGAESFGIIVAWKIRLVAVPKSTMFSVKKIMEIHELVKLVNKWQNIAYKYDKDLLLMTHFITRNITDNQGKNKTAIHTYFSSVFLGGVDSLVDLMNKSFPELGIKKTDCRQLSWIDTIIFYSGVVNYDTANFNKEILLDRSAGQNGAFKIKLDYVKKPIPESVFVQILEKLYEEDIGAGMYALYPYGGIMDEISESAIPFPHRAGILYELWYICSWEKQEDNEKHLNWIRNIYNFMTPYVSQNPRLAYLNYRDLDIGINDPKNPNNYTQARIWGEKYFGKNFDRLVKVKTLVDPNNFFRNEQSIPPLPRHRH

SEQ ID NO: 195 - protein, 523 aa, Artificial Sequence
  source: /note="Description of Artificial Sequence: Synthetic polypeptide"
NIQTSIANPRENFLKCFSQYIPNNATNLKLVYTQNNPLYMSVLNSTIHNLRFSSDTTPKPLVIVTPSHVSHIQGTILCSKKVGLQIRTRSGGHDSEGMSYISQVPFVIVDLRNMRSIKIDVHSQTAWVEAGATLGEVYYWVNEKNESLSLAAGYCPTVCAGGHFGGGGYGPLMRSYGLAADNIIDAHLVNVHGKVLDRKSMGEDLFWALRGGGAESFGIIVAWKIRLVAVPKSTMFSVKKIMEIHELVKLVNKWQNIAYKYDKDLLLMTHFITRNITDNQGKNKTAIHTYFSSVFLGGVDSLVDLMNKSFPELGIKKTDCRQLSWIDTIIFYSGVVNYDTDNFNKEILLDRSAGQNGAFKIKLDYVKKPIPESVFVQILEKLYEEDIGAGMYALYPYGGIMDEISESAIPFPHRAGILYELWYICSWEKQEDNEKHLNWIRNIYNFMTPYVSQNPRLAYLNYRDLDIGINDPKNPNNYTQARIWGEKYFGKNFDRLVKVKTKVDPNNFFRNEQSIPPLPRHRH

SEQ ID NO: 196 - protein, 523 aa, Artificial Sequence
  source: /note="Description of Artificial Sequence: Synthetic polypeptide"
NIQTSIANPRENFLKCFSQYIPNNATNLKLVYTQNNPLYMSVLNSTIHNLRFSSDTTPKPLVIVTPSHVSHIQGTILCSKKVGLQIRTRSGGHDSEGMSYISQVPFVIVDLRNMRSIKIDVHSQTAWVEAGATLGEVYYWVNEKNESLSLAAGYCPTVCAGGHFGGGGYGPLMRSYGLAADNIIDAHLVNVHGKVLDRKSMGEDLFWALRGGGAESFGIIVAWKIRLVAVPKSTMFSVKKIMEIHELVKLVNKWQNIAYKYDKDLLLMTHFITRNITDNQGKNKTAIHTYFSSVFLGGVDSLVDLMNKSFPELGIKKTDCRQLSWIDTIIFYSGVVNYDTDNFKKEILLDRSAGQNGAFKIKLDYVKKPIPESVFVQILEKLYEEDIGAGMYALYPYGGIMDEISESAIPFPHRAGILYELWYICSWEKQEDNEKHLNWIRNIYNFMTPYVSQNPRLAYLNYRDLDIGINDPKNPNNYTQARIWGEKYFGKNFDRLVKVKTLVDPNNFFRNEQSIPPLPRHRH

SEQ ID NO: 197 - protein, 523 aa, Artificial Sequence
  source: /note="Description of Artificial Sequence: Synthetic polypeptide"
NIQTSIANPRENFLKCFSQYIPNNATNLKLVYTQNNPLYMSVLNSTIHNLRFSSDTTPKPLVIVTPSHVSHIQGTILCSKKVGLQIRTRSGGHDSEGMSYISQVPFVIVDLRNMRSIKIDVHSQTAWVEAGATLGEVYYWVNEKNESLSLAAGYCPTVCAGGHFGGGGYGPLMRSYGLAADNIIDAHLVNVHGKVLDRKSMGEDLFWALRGGGAESFGIIVAWKIRLVAVPKSTMFSVKKIMEIHELVKLVNKWQNIAYKYDKDLLLMTHFITRNITDNQGKNKTAIHTYFSSVFLGGVDSLVDLMNKSFPELGIKKTDCRQLSWIDTIIFYSGVVNYDTDNFNKEILLDRSAGKNGAFKIKLDYVKKPIPESVFVQILEKLYEEDIGAGMYALYPYGGIMDEISESAIPFPHRAGILYELWYICSWEKQEDNEKHLNWIRNIYNFMTPYVSQNPRLAYLNYRDLDIGINDPKNPNNYTQARIWGEKYFGKNFDRLVKVKTLVDPNNFFRNEQSIPPLPRHRH

SEQ ID NO: 198 - protein, 523 aa, Artificial Sequence
  source: /note="Description of Artificial Sequence: Synthetic polypeptide"
NIQTSIANPRENFLKCFSQYIPNNATNLKLVYTQNNPLYMSVLNSTIHNLRFSSDTTPKPLVIVTPSHVSHIQGTILCSKKVGLQIRTRSGGHDSEGMSYISQVPFVIVDLRNMRSIKIDVHSQTAWVEAGATLGEVYYWVNEKNESLSFAAGYCPTVCAGGHFGGGGYGPLMRSYGLAADNIIDAHLVNVHGKVLDRKSMGEDLFWALRGGGAESFGIIVAWKIRLVAVPKSTMFSVKKIMEIHELVKLVNKWQNIAYKYDKDLLLMTHFITRNITDNQGKNKTAIHTYFSSVFLGGVDSLVDLMNKSFPELGIKKTDCRQLSWIDTIIFYSGVVNYDTDNFNKEILLDRSAGQNGAFKIKLDYVKKPIPESVFVQILEKLYEEDIGAGMYALYPYGGIMDEISESAIPFPHRAGILYELWYICSWEKQEDNEKHLNWIRNIYNFMTPYVSQNPRLAYLNYRDLDIGINDPKNPNNYTQARIWGEKYFGKNFDRLVKVKTLVDPNNFFRNEQSIPPLPRHRH

SEQ ID NO: 199 - protein, 523 aa, Artificial Sequence
  source: /note="Description of Artificial Sequence: Synthetic polypeptide"
NIQTSIANPRENFLKCFSQYIPNNAANLKLVYTQNNPLYMSVLNSTIHNLRFSSDTTPKPLVIVTPSHVSHIQGTILCSKKVGLQIRTRSGGHDSEGMSYISQVPFVIVDLRNMRSIKIDVHSQTAWVEAGATLGEVYYWVNEKNESLSLAAGYCPTVCAGGHFGGGGYGPLMRSYGLAADNIIDAHLVNVHGKVLDRKSMGEDLFWALRGGGAESFGIIVAWKIRLVAVPKSTMFSVKKIMEIHELVKLVNKWQNIAYKYDKDLLLMTHFITRNITDNQGKNKTAIHTYFSSVFLGGVDSLVDLMNKSFPELGIKKTDCRQLSWIDTIIFYSGVVNYDTDNFNKEILLDRSAGQNGAFKIKLDYVKKPIPESVFVQILEKLYEEDIGAGMYALYPYGGIMDEISESAIPFPHRAGILYELWYICSWEKQEDNEKHLNWIRNIYNFMTPYVSQNPRLAYLNYRDLDIGINDPKNPNNYTQARIWGEKYFGKNFDRLVKVKTLVDPNNFFRNEQSIPPLPRHRH

SEQ ID NO: 200 - protein, 523 aa, Artificial Sequence
  source: /note="Description of Artificial Sequence: Synthetic polypeptide"
NIQTSIANPRENFLKCFSQYIPNNATNLKLVYTQNNPLYMSVLNSTIHNLRFSSDTTPKPLVIVTPSHVSHIQGTILCSKKVGLQIRTRSGGHDSEGMSYISQVPFVIVDLRNMRSIKIDVHSQTAWVEAGATLGEVYYWVNEKNESLSLAAGYCPTVCAGGHFGGGGYGPLMRSYGLAADNIIDAHLVNVHGKVLDRKSMGEDLFWALRGGGAESFGIIVAWKIRLVAVPKSTMFSVKKIMEIHELVKLVNKWQNIAYKYDKDLLLMTHFITRNITDNQGKNKTAIHTYFSSVFLGGVDSLVDLMNKSFPELGIKKTDCRQLSWIDTIIFYSGVVNYDTDNFNKEILLDRSAGQNGAFKIKLDYVKKPIPESVFVQILEKLYEEDIGAGMYALYPYGGIMEEISESAIPFPHRAGILYELWYICSWEKQEDNEKHLNWIRNIYNFMTPYVSQNPRLAYLNYRDLDIGINDPKNPNNYTQARIWGEKYFGKNFDRLVKVKTLVDPNNFFRNEQSIPPLPRHRH

SEQ ID NO: 201 - protein, 523 aa, Artificial Sequence
  source: /note="Description of Artificial Sequence: Synthetic polypeptide"
NIQTSIANPRENFLKCFSQYIPNNATNLKLVYTQNNPLYMSVLNSTIHNLRFSSDTTPKPLVIVTPSHVSHIQGTILCSKKVGLQIRTRSGGHDSEGMSYISQVPFVIVDLRNMRSIKIDVHSQTAWVEAGATLGEVYYWVNEKNESLSLAAGYCPTVCAGGHFGGGGYGPLMRSYGLAADNIIDAHLVNVHGKVLDRKSMGEDLFWALRGGGAESFGIIVAWKIRLVAVPKSTMFSVKKIMEIHELVKLVNKWQNIAYKYDKDLLLMTHFITRNITDNQGKNKTAIHTYFSSIFLGGVDSLVDLMNKSFPELGIKKTDCRQLSWIDTIIFYSGVVNYDTDNFNKEILLDRSAGQNGAFKIKLDYVKKPIPESVFVQILEKLYEEDIGAGMYALYPYGGIMDEISESAIPFPHRAGILYELWYICSWEKQEDNEKHLNWIRNIYNFMTPYVSQNPRLAYLNYRDLDIGINDPKNPNNYTQARIWGEKYFGKNFDRLVKVKTLVDPNNFFRNEQSIPPLPRHRH

SEQ ID NO: 202 - protein, 523 aa, Artificial Sequence
  source: /note="Description of Artificial Sequence: Synthetic polypeptide"
NIQTSIANPRENFLKCFSQYIPNNATNLKLVYTQNNPLYMSVLNSTIHNLRFSSDTTPKPLVIVTPSHVSHIQGTILCSKKVGLQIRTRSGGHDSEGMSYISQVPFVIVDLRNMRSIKIDVHSQTAWVEAGATLGEVYYWINEKNESLSLAAGYCPTVCAGGHFGGGGYGPLMRSYGLAADNIIDAHLVNVHGKVLDRKSMGEDLFWALRGGGAESFGIIVAWKIRLVAVPKSTMFSVKKIMEIHELVKLVNKWQNIAYKYDKDLLLMTHFITRNITDNQGKNKTAIHTYFSSVFLGGVDSLVDLMNKSFPELGIKKTDCRQLSWIDTIIFYSGVVNYDTDNFNKEILLDRSAGQNGAFKIKLDYVKKPIPESVFVQILEKLYEEDIGAGMYALYPYGGIMDEISESAIPFPHRAGILYELWYICSWEKQEDNEKHLNWIRNIYNFMTPYVSQNPRLAYLNYRDLDIGINDPKNPNNYTQARIWGEKYFGKNFDRLVKVKTLVDPNNFFRNEQSIPPLPRHRH

SEQ ID NO: 203 - protein, 523 aa, Artificial Sequence
  source: /note="Description of Artificial Sequence: Synthetic polypeptide"
NIQTSIANPRENFLKCFSQYIPNNATNLKLVYTQNNPLYMSVLNSTIHNLRFSSDTTPKPLVIVTPSHVSHIQGTILCSKKVGLQIRTRSGGHDSEGMSYISQVPFVIVDLRNMHSIKIDVHSQTAWVEAGATLGEVYYWVNEKNESLSLAAGYCPTVCAGGHFGGGGYGPLMRSYGLAADNIIDAHLVNVHGKVLDRKSMGEDLFWALRGGGAESFGIIVAWKIRLVAVPKSTMFSVKKIMEIHELVKLVNKWQNIAYKYDKDLLLMTHFITRNITDNQGKNKTAIHTYFSSVFLGGVDSLVDLMNKSFPELGIKKTDCRQLSWIDTIIFYSGVVNYDTDNFNKEILLDRSAGQNGAFKIKLDYVKKPIPESVFVQILEKLYEEDIGAGMYALYPYGGIMDEISESAIPFPHRAGILYELWYICSWEKQEDNEKHLNWIRNIYNFMTPYVSQNPRLAYLNYRDLDIGINDPKNPNNYTQARIWGEKYFGKNFDRLVKVKTLVDPNNFFRNEQSIPPLPRHRH

SEQ ID NO: 204 - protein, 523 aa, Artificial Sequence
  source: /note="Description of Artificial Sequence: Synthetic polypeptide"
NIQTSIANPRENFLKCFSQYIPNNATNLKLVYTQNNPLYMSVLNSTIHNLRFSSDTTPKPLVIVTPSHVSHIQGTILCSKKVGLQIRTRSGGHDSEGMSYISQVPFVIVDLRNMRSIKIDVHSQTAWVEAGATLGEVYYWVNEKNENLSLAAGYCPTVCAGGHFGGGGYGPLMRSYGLAADNIIDAHLVNVHGKVLDRKSMGEDLFWALRGGGAESFGIIVAWKIRLVAVPKSTMFSVKKIMEIHELVKLVNKWQNIAYKYDKDLLLMTHFITRNITDNQGKNKTAIHTYFSSVFLGGVDSLVDLMNKSFPELGIKKTDCRQLSWIDTIIFYSGVVNYDTDNFNKEILLDRSAGQNGAFKIKLDYVKKPIPESVFVQILEKLYEEDIGAGMYALYPYGGIMDEISESAIPFPHRAGILYELWYICSWEKQEDNEKHLNWIRNIYNFMTPYVSQNPRLAYLNYRDLDIGINDPKNPNNYTQARIWGEKYFGKNFDRLVKVKTLVDPNNFFRNEQSIPPLPRHRH

SEQ ID NO: 205 - protein, 523 aa, Artificial Sequence
  source: /note="Description of Artificial Sequence: Synthetic polypeptide"
NIQTSIANPRENFLKCFSQYIPNNATNLKLVYTQNNPLYMSVLNSTIHNLRFSSDTTPKPLVIVTPSHVSHIQGTILCSKKVGLQIRTRSGGHDSEGMSYISQVPFVIVDLRNMRSIKIDVHSQTAWVEAGATLGEVYYWVNEKNESLSLAAGYCPTVCAGGHFGGGGYGPLMRSYGLAADNIIDAHLVNVHGKVLDRKSMGEDLFWALRGGGAESFGIIVAWKIRLVAVPKSTMFSVKKIMEIHELVKLVNKWQNIAYKYDKDLLLMTHFITRNITDNQGKNKTAIHTYFSSVFLGGVDSLVDLMNKSFPELGIKKTDCRQLSWIDTIIFYSGVVNYDTDNFNKEILLDRSAGQNGAFKIKLDYVKKPIPETVFVQILEKLYEEDIGAGMYALYPYGGIMDEISESAIPFPHRAGILYELWYICSWEKQEDNEKHLNWIRNIYNFMTPYVSQNPRLAYLNYRDLDIGINDPKNPNNYTQARIWGEKYFGKNFDRLVKVKTLVDPNNFFRNEQSIPPLPRHRH

SEQ ID NO: 206 - protein, 523 aa, Artificial Sequence
  source: /note="Description of Artificial Sequence: Synthetic polypeptide"
NIQTSIANPRENFLKCFSQYIPNNPTNLKLVYTQNNPLYMSVLNSTIHNLRFSSDTTPKPLVIVTPSHVSHIQGTILCSKKVGLQIRTRSGGHDSEGMSYISQVPFVIVDLRNMRSIKIDVHSQTAWVEAGATLGEVYYWVNEKNESLSLAAGYCPTVCAGGHFGGGGYGPLMRSYGLAADNIIDAHLVNVHGKVLDRKSMGEDLFWALRGGGAESFGIIVAWKIRLVAVPKSTMFSVKKIMEIHELVKLVNKWQNIAYKYDKDLLLMTHFITRNITDNQGKNKTAIHTYFSSVFLGGVDSLVDLMNKSFPELGIKKTDCRQLSWIDTIIFYSGVVNYDTDNFNKEILLDRSAGQNGAFKIKLDYVKKPIPESVFVQILEKLYEEDIGAGMYALYPYGGIMDEISESAIPFPHRAGILYELWYICSWEKQEDNEKHLNWIRNIYNFMTPYVSQNPRLAYLNYRDLDIGINDPKNPNNYTQARIWGEKYFGKNFDRLVKVKTLVDPNNFFRNEQSIPPLPRHRH

SEQ ID NO: 207 - protein, 523 aa, Artificial Sequence
  source: /note="Description of Artificial Sequence: Synthetic polypeptide"
NIQTSIANPRENFLKCFSQYIPNNATNLKLVYTQNNPLYMSVLNSTIHNLRFSSDTTPKPLVIVTPSHVSHIQGTILCSKKVGLQIRTRSGGHDSEGMSYISQVPFVIVDLRNMRSIKIDVHSQTAWVEAGATLGEVYYWVNEKNESLSLAAGYCPTVCAGGHFGGGGYGPLMRSYGLAADNIIDAHLVNVHGKVLDRKSMGEDLFWALRGGGAESFGIIVAWKIRLVAVPKSTMFSVKKIMEIHELVKLVNKWQNIAYKYDKDLLLMTHFITKNITDNQGKNKTAIHTYFSSVFLGGVDSLVDLMNKSFPELGIKKTDCRQLSWIDTIIFYSGVVNYDTDNFNKEILLDRSAGQNGAFKIKLDYVKKPIPESVFVQILEKLYEEDIGAGMYALYPYGGIMDEISESAIPFPHRAGILYELWYICSWEKQEDNEKHLNWIRNIYNFMTPYVSQNPRLAYLNYRDLDIGINDPKNPNNYTQARIWGEKYFGKNFDRLVKVKTLVDPNNFFRNEQSIPPLPRHRH

SEQ ID NO: 208 - protein, 523 aa, Artificial Sequence
  source: /note="Description of Artificial Sequence: Synthetic polypeptide"
NIQTSIANPRENFLKCFSQYIPNNATNLKLVYTQNNPLYMSVLNSTIHNLRFSSDTTPKPLVIVTPSHVSHIQGTILCSKKVGLQIRTRSGGHDSEGMSYISQVPFVIVDLRNMRSIKIDVHSQTAWVEAGATLGEVYYWVNEKNESLSLPAGYCPTVCAGGHFGGGGYGPLMRSYGLAADNIIDAHLVNVHGKVLDRKSMGEDLFWALRGGGAESFGIIVAWKIRLVAVPKSTMFSVKKIMEIHELVKLVNKWQNIAYKYDKDLLLMTHFITRNITDNQGKNKTAIHTYFSSVFLGGVDSLVDLMNKSFPELGIKKTDCRQLSWIDTIIFYSGVVNYDTDNFNKEILLDRSAGQNGAFKIKLDYVKKPIPESVFVQILEKLYEEDIGAGMYALYPYGGIMDEISESAIPFPHRAGILYELWYICSWEKQEDNEKHLNWIRNIYNFMTPYVSQNPRLAYLNYRDLDIGINDPKNPNNYTQARIWGEKYFGKNFDRLVKVKTLVDPNNFFRNEQSIPPLPRHRH

SEQ ID NO: 209 - protein, 523 aa, Artificial Sequence
  source: /note="Description of Artificial Sequence: Synthetic polypeptide"
NIQTSIANPRENFLKCFSQYIPNNATNLKLVYTQNNPLYMSVLNSTIHNLRFSSDTTPKPLVIVTPSHVSHIQGTILCSKKVGLQIRTRSGGHDSEGMSYISQVPFVIVDLRNMRSIKIDVHSQTAWVEAGATLGEVYYWVNEKNESLSLAAGYCPTVCAGGHFGGGGYGPLMRSYGLAADNIIDAHLVNVHGKVLDRKSMGEDLFWALRGGGAESFGIIVAWKIRLVAVPKSTMFSVKKIMEIHELVKLVNKWQNIAYKYDKDLLLMTHFITRNITDNQGKNKTAIHTYFSSVFLGGVDSLVDLMNKSFPELGIKKTDCRQLSWIDTIIFYSGVVNYDTDNFNKEILLDRSAGQNGAFKIKLDYVKKPIPESVFVQILEKLYEEDIGAGMYALYPYGGIMDEISESAIPFPHRAGILYELWYICSWEKQEDNEKHINWIRNIYNFMTPYVSQNPRLAYLNYRDLDIGINDPKNPNNYTQARIWGEKYFGKNFDRLVKVKTLVDPNNFFRNEQSIPPLPRHRH

SEQ ID NO: 210 - protein, 523 aa, Artificial Sequence
  source: /note="Description of Artificial Sequence: Synthetic polypeptide"
NIQTSIANPRENFLKCFSQYIPNNATNLKLVYTQNNPLYMSVLNSTIHNLRFSSDTTPKPLVIVTPSHVSHIQGTILCSKKVGLQIRTRSGGHDSEGMSYISQVPFVIVDLRNMRSIKIDVHSQTAWVEAGATLGEVYYWVNEKNESLSLAAGYCPTVCAGGHFGGGGYGPLMRNYGLAADNIIDAHLVNVHGKVLDRKSMGEDLFWALRGGGAESFGIIVAWKIRLVAVPKSTMFSVKKIMEIHELVKLVNKWQNIAYKYDKDLLLMTHFITRNITDNQGKNKTAIHTYFSSVFLGGVDSLVDLMNKSFPELGIKKTDCRQLSWIDTIIFYSGVVNYDTDNFNKEILLDRSAGQNGAFKIKLDYVKKPIPESVFVQILEKLYEEDIGAGMYALYPYGGIMDEISESAIPFPHRAGILYELWYICSWEKQEDNEKHLNWIRNIYNFMTPYVSQNPRLAYLNYRDLDIGINDPKNPNNYTQARIWGEKYFGKNFDRLVKVKTLVDPNNFFRNEQSIPPLPRHRH

SEQ ID NO: 211 - protein, 523 aa, Artificial Sequence
  source: /note="Description of Artificial Sequence: Synthetic polypeptide"
NIQTSIANPRENFLKCFSQYIPNNATNLKLVYTQNNPLYMSVLNSTIHNLRFSSDTTPKPLVIVTPSHVSHIQGTILCSKKVGLQIRTRSGGHDSEGMSYISQVPFVIVDLRNMRSIKIDVHSQTAWVEAGATLGEVYYWVNEKNESLSLAAGYCPTVCAGGHFGGGGYGPLMRSYGLAADNIIDAHLVNVHGKVLDRKSMGEDLFWALRGGGAESFGIIVAWKIRLVAVPKSTMFSVKKIMEIHELVKLVNKWQNIAYKYDKDLLLMTHFITRNITDNQGKNKTAIHGYFSSVFLGGVDSLVDLMNKSFPELGIKKTDCRQLSWIDTIIFYSGVVNYDTDNFNKEILLDRSAGQNGAFKIKLDYVKKPIPESVFVQILEKLYEEDIGAGMYALYPYGGIMDEISESAIPFPHRAGILYELWYICSWEKQEDNEKHLNWIRNIYNFMTPYVSQNPRLAYLNYRDLDIGINDPKNPNNYTQARIWGEKYFGKNFDRLVKVKTLVDPNNFFRNEQSIPPLPRHRH

SEQ ID NO: 212 - protein, 523 aa, Artificial Sequence
  source: /note="Description of Artificial Sequence: Synthetic polypeptide"
NIQTSIANPRENFLKCFSQYIPNNATNLKLVYTQHNPLYMSVLNSTIHNLRFSSDTTPKPLVIVTPSHVSHIQGTILCSKKVGLQIRTRSGGHDSEGMSYISQVPFVIVDLRNMRSIKIDVHSQTAWVEAGATLGEVYYWVNEKNESLSLAAGYCPTVCAGGHFGGGGYGPLMRSYGLAADNIIDAHLVNVHGKVLDRKSMGEDLFWALRGGGAESFGIIVAWKIRLVAVPKSTMFSVKKIMEIHELVKLVNKWQNIAYKYDKDLLLMTHFITRNITDNQGKNKTAIHTYFSSVFLGGVDSLVDLMNKSFPELGIKKTDCRQLSWIDTIIFYSGVVNYDTDNFNKEILLDRSAGQNGAFKIKLDYVKKPIPESVFVQILEKLYEEDIGAGMYALYPYGGIMDEISESAIPFPHRAGILYELWYICSWEKQEDNEKHLNWIRNIYNFMTPYVSQNPRLAYLNYRDLDIGINDPKNPNNYTQARIWGEKYFGKNFDRLVKVKTLVDPNNFFRNEQSIPPLPRHRH

SEQ ID NO: 213 - protein, 523 aa, Artificial Sequence
  source: /note="Description of Artificial Sequence: Synthetic polypeptide"
NIQTSIANPRENFLKCFSQYIPNNATNLKLVYTQNNPLYMSVLNSTIHNLRFSSDTTPKPLVIVTPSHVSHIQGTILCSKKVGLQIRTRSGGHDSEGMSYISQVPFVIVDLRNMRSIKIDVHSQTAWVEAGATLGEVYYWVNEKNESLSLAAGYCPTVCAGGHFGGGGYGPLMRSYGLAADNIIDAHLVNVHGKVLDRKSMGEDLFWALRGGGAESFGIIVAWKIRLVAVPKSTMFSVKKIMEIHELVKLVNKWQNIAYKYDKDLLLMTHFITRNITDNQGKNKTAIHTYFSSVFLGGVDSLVDLMNKSFPELGIKKTDCRQLSWIDTIIFYSGVVNYDTDNFNKEILLDRSAGQNGAFKIKLDYVKKPIPESAFVQILEKLYEEDIGAGMYALYPYGGIMDEISESAIPFPHRAGILYELWYICSWEKQEDNEKHLNWIRNIYNFMTPYVSQNPRLAYLNYRDLDIGINDPKNPNNYTQARIWGEKYFGKNFDRLVKVKTLVDPNNFFRNEQSIPPLPRHRH

SEQ ID NO: 214 - protein, 523 aa, Artificial Sequence
  source: /note="Description of Artificial Sequence: Synthetic polypeptide"
NIQTSIANPRENFLKCFSQYIPNNATNLKLVYTQNNPLYMSVLNSTIHNLRFSSDTTPKPLVIVTPSHVSHIQGTILCSKKVGLQIRTRSGGHDSEGMSYISQVPFVIVDLRNMRSIKIDVHSQTAWVEAGATLGEVYYWVNEKNESLSLAAGYCPTVCAGGHFGGGGYGPLMRSYGLAADNIIDAHLVNVHGKVLDRKSMGEDLFWALRGGGAESFGIIVAWKIRLVAVPKSTMFSVKKIMEIHELVKLVNKWQNIAYKYDKDLLLMTHFITRNITDNQGKNKTAIHTYFSSVFLGGVDSLVDLMNKSFPELGIKKTDCRQLSWIDTIIFYSGVVNYDTDNFNKEILLDRSAGQNGAFKIKLDYVKKPIPESVFVQILEKLYEEDIGAGMYALYPYGGIMDEISESAIPFPHRAGILYELWYICSWEKQEDNEKHLNWIRNIYNFMTPYVSQNPRLAYLNYRDLDIGINDPKSPNNYTQARIWGEKYFGKNFDRLVKVKTLVDPNNFFRNEQSIPPLPRHRH

SEQ ID NO: 215 - protein, 523 aa, Artificial Sequence
  source: /note="Description of Artificial Sequence: Synthetic polypeptide"
NIQTSIANPRENFLKCFSQYIPNNATNLKLVYTQNNPLYMSVLNSTIHNLRFSSDTTPKPLVIVTPSHVSHIQGTILCSKKVGLQIRTRSGGHDSEGMSYISQVPFVIVDLRNMRSIKIDVHSQTAWVEAGATLGEVYYWVNEKNESLSLAAGYCPTVCAGGHFGGGGYGPLMRSYGLAADNIIDAHLVNVHGKVLDRKSMGEDLFWALRGGGAESFGIIVAWKIRLVAVPKSTMFSVKKIMEIHELVKLVNKWQNIAYKYDKDLLLMTHFITRNITDNQGKNKTAIHTYFSSVFLGGVDSLVDLMNKSFPELGIKKTDCRQLSWIDTIIFYSGVVNYDTDNFNKEILLDRSAGQNGAFKIKLDYVKKPIPESVFVQILEKLYEEDIGAGMYALYPYGGIMDEISESAIPFPHRAGILYELWYICSWEKQEDNEKHLNWIRNIYNFMTPYVSQNPRLAYLNYRDLDIGKNDPKNPNNYTQARIWGEKYFGKNFDRLVKVKTLVDPNNFFRNEQSIPPLPRHRH

SEQ ID NO: 216 - protein, 523 aa, Artificial Sequence
  source: /note="Description of Artificial Sequence: Synthetic polypeptide"
NIQTSIANPRENFLKCFSQYIPNNATNLKLVYTQNNPLYMSVLNSTIHNLRFSSDTTPKPLVIVTPSHVSHIQGTILCSKKVGLQIRTRSGGHDSEGMSYISQVPFVIVDLRNMRSIKIDVHSQTAWVEAGATLGEVYYWVNEKNESLSLAAGYCPTVCAGGHFGGGGYGPLMRSYGLAADNIIDAHLVNVHGKVLDRKSMGEDLFWALRGGGAESFGIIVAWKIRLVAVPKSTMFSVKKIMEIHELVKLVNKWQNIAYKYDKDLLLMTHFITRNITDNQGKNKTAVHTYFSSVFLGGVDSLVDLMNKSFPELGIKKTDCRQLSWIDTIIFYSGVVNYDTDNFNKEILLDRSAGQNGAFKIKLDYVKKPIPESVFVQILEKLYEEDIGAGMYALYPYGGIMDEISESAIPFPHRAGILYELWYICSWEKQEDNEKHLNWIRNIYNFMTPYVSQNPRLAYLNYRDLDIGINDPKNPNNYTQARIWGEKYFGKNFDRLVKVKTLVDPNNFFRNEQSIPPLPRHRH

SEQ ID NO: 217 - protein, 523 aa, Artificial Sequence
  source: /note="Description of Artificial Sequence: Synthetic polypeptide"
NIQTSIANPRENFLKCFSQYIPNNATNLKLVYTQNNPLYMSVLNSTIHNLRFSSDTTPKPLVIVTPSNVSHIQGTILCSKKVGLQIRTRSGGHDSEGMSYISQVPFVIVDLRNMRSIKIDVHSQTAWVEAGATLGEVYYWVNEKNESLSLAAGYCPTVCAGGHFGGGGYGPLMRSYGLAADNIIDAHLVNVHGKVLDRKSMGEDLFWALRGGGAESFGIIVAWKIRLVAVPKSTMFSVKKIMEIHELVKLVNKWQNIAYKYDKDLLLMTHFITRNITDNQGKNKTAIHTYFSSVFLGGVDSLVDLMNKSFPELGIKKTDCRQLSWIDTIIFYSGVVNYDTDNFNKEILLDRSAGQNGAFKIKLDYVKKPIPESVFVQILEKLYEEDIGAGMYALYPYGGIMDEISESAIPFPHRAGILYELWYICSWEKQEDNEKHLNWIRNIYNFMTPYVSQNPRLAYLNYRDLDIGINDPKNPNNYTQARIWGEKYFGKNFDRLVKVKTLVDPNNFFRNEQSIPPLPRHRH

SEQ ID NO: 218 - protein, 523 aa, Artificial Sequence
  source: /note="Description of Artificial Sequence: Synthetic polypeptide"
NIQTSIANPRENFLKCFSQYIPNNATNLKLVYTQNNPLYMSVLNSTIHNLRFSSDTTPKPLVIVTPSHVSHIQGTILCSKKVGLQIRTRSGGHDSEGMSYISQVPFVIVDLRNMRSIKIDVHSQTAWVEAGATLGEVYYWVNEKNESLSLAAGYCPTVCAGGHFGGGGYGPLMRSYGLAADNIIDAHLVNVHGKVLDRKSMGEDLFWALRGGGAESFGIIVAWKIRLVAVPKSTMFSVKKIMEIHELVKLVNKWQNIAYKYDKDLLLMTHFITRNITDNQGKNKTAIHTYFSSVFLGGVDSLVDLMNKSFPELGIKKTDCRQLSWIDTIIFYSGVVNYDTDNFNKEILLDRSAGQNGAFKIKLDYVKKPIPESVMVQILEKLYEEDIGAGMYALYPYGGIMDEISESAIPFPHRAGILYELWYICSWEKQEDNEKHLNWIRNIYNFMTPYVSQNPRLAYLNYRDLDIGINDPKNPNNYTQARIWGEKYFGKNFDRLVKVKTLVDPNNFFRNEQSIPPLPRHRH

SEQ ID NO: 219 - protein, 523 aa, Artificial Sequence
  source: /note="Description of Artificial Sequence: Synthetic polypeptide"
NIQTSIANPRENFLKCFSQYIPNNATNLKLVYTQNNPLYMSVLNSTIHNLRFSSDTTPKPLVIVTPSHVSHIQGTILCSKKVGLQIRTRSGGHDSEGMSYISQVPFVIVDLRNMRSIKIDVHSQTAWVEAGATLGEVYYWVNEKNESLSLAAGYCPTVCAGGHFGGGGYGPLMRSYGLAADNIIDAHLVNVHGKVLDRKSMGEDLFWALRGGGAESFGIIVAWKIRLVAVPKSTMFSVKKIMEIHELVKLVNKWQNIAYKYDKDLLLMTHFITRNITDNQGKNKTTIHTYFSSVFLGGVDSLVDLMNKSFPELGIKKTDCRQLSWIDTIIFYSGVVNYDTDNFNKEILLDRSAGQNGAFKIKLDYVKKPIPESVFVQILEKLYEEDIGAGMYALYPYGGIMDEISESAIPFPHRAGILYELWYICSWEKQEDNEKHLNWIRNIYNFMTPYVSQNPRLAYLNYRDLDIGINDPKNPNNYTQARIWGEKYFGKNFDRLVKVKTLVDPNNFFRNEQSIPPLPRHRH

SEQ ID NO: 220 - protein, 523 aa, Artificial Sequence
  source: /note="Description of Artificial Sequence: Synthetic polypeptide"
NIQTSIANPRENFLKCFSQYIPNNATNLKLVYTQNNPLYMSVLNSTIHNLRFSSDTTPKPLVIVTPSHVSHIQGTILCSKKVGLQIRTRSGGHDSEGMSYISQVPFVIVDLRNMRSIKIDVHSQTAWVEAGATLGEVYYWVNEKNESLSLAAGYCPTVCAGGHFGGGGYGPLMRSYGLAADNIIDAHLVNVHGKVLDRKSMGEDLFWALRGGGAESFGIIVAWKIRLVAVPKSTMFSVKKIMEIHELVKLVNKWQNIAYKYDKDLLLMTHFITRNITDNQGKNKTAIHTYFSSVFLGGVDSLVDLMNKSFPELGIKKTDCRQLSWIDTIIFYSGVVNYDTDNFNKEILLDRSAGQNGAFKIKLDYVKKPIPESVFVQILEKLYEEDIGAGMYALYPYGGIMDEISESAIPFPHRAGILYELWYICSWEKQEDNEKHLNWIRNIYNFMTPYVSQNPRLAYLNYRDLDIGINDPKNPNNYTQARIWGEKYFGKNFNRLVKVKTLVDPNNFFRNEQSIPPLPRHRH

SEQ ID NO: 221 - protein, 523 aa, Artificial Sequence
  source: /note="Description of Artificial Sequence: Synthetic polypeptide"
NIQTSIANPRENFLKCFSQYIPNNATNLKLVYTQNNPLYMSVLNSTIHNLRFSSDTTPKPLVIVTPSHVSHIQGTILCSKKVGLQIRTRSGGHDSEGMSYISQVPFVIVDLRNMRSIKIDVHSQTAWVEAGATLGEVYYWVNEKNESLSLAAGYCPTVCAGGHFGGGGYGPLMRSYGLAADNIIDAHLVNVHGKVLDRKSMGEDLFWALRGGGAESFGIIVAWKIRLVAVPKSTMFSVKKIMEIHELVKLVNKWQNIAYKYDKDLLLMTHFITRNITDNQGKNKTAIHTYFSSVFLGGVDSLVDLMNKSFPELGIKKTDCRQLSWIDTIIFYSGVVNYDTDNFNKEILLDRSAGQKGAFKIKLDYVKKPIPESVFVQILEKLYEEDIGAGMYALYPYGGIMDEISESAIPFPHRAGILYELWYICSWEKQEDNEKHLNWIRNIYNFMTPYVSQNPRLAYLNYRDLDIGINDPKNPNNYTQARIWGEKYFGKNFDRLVKVKTLVDPNNFFRNEQSIPPLPRHRH

SEQ ID NO: 222 - protein, 523 aa, Artificial Sequence
  source: /note="Description of Artificial Sequence: Synthetic polypeptide"
NIQTSIANPRENFLKCFSQYIPNNATNLKLVYTQNNPLYMSVLNSTIHNLRFSSDTTPKPLVIVTPSHVSHIQGTILCSKKVGLQIRTRSGGHDSEGMSYISQVPFVIVDLRNMRSIKIDVHSQTAWVEAGATLGEVYYWVNEKNESLSLAAGYCPTVCAGGHFGGGGYGPLMRSYGLAADNIIDAHLVNVHGKVLDRKSMGEDLFWALRGGGAESFGIIVAWKIRLVAVPKSTMFSVKKIMEIHELVKLVNKWQNIAYKYDKDLLLMTHFITRNITDNQGKNKTAIHTYFSSVFLGGVDSLVDLMNKSFPELGIKKTDCRQLSWIDTIIFYSGVVNYDTDNFNKEILLDRSAGQNGAFKIKLDYVKKPIPESVFVQILEKLYEEDIGAGMYALYPYGGIMDEISESAIPFPHRAGILYELWYICSWEKQEDNEKHLNWIRNIYNFMTPYVSQNPRLAYLNYRDLDIGINNPKNPNNYTQARIWGEKYFGKNFDRLVKVKTLVDPNNFFRNEQSIPPLPRHRH

SEQ ID NO: 223 - protein, 523 aa, Artificial Sequence
  source: /note="Description of Artificial Sequence: Synthetic polypeptide"
NIQTSIANPRENFLKCFSQYIPNNATNLKLVYTQNNPLYMSVLNSTIHNLRFSSDTTPKPLVIVTPSHVSHIQGSILCSKKVGLQIRTRSGGHDSEGMSYISQVPFVIVDLRNMRSIKIDVHSQTAWVEAGATLGEVYYWVNEKNESLSLAAGYCPTVCAGGHFGGGGYGPLMRSYGLAADNIIDAHLVNVHGKVLDRKSMGEDLFWALRGGGAESFGIIVAWKIRLVAVPKSTMFSVKKIMEIHELVKLVNKWQNIAYKYDKDLLLMTHFITRNITDNQGKNKTAIHTYFSSVFLGGVDSLVDLMNKSFPELGIKKTDCRQLSWIDTIIFYSGVVNYDTDNFNKEILLDRSAGQNGAFKIKLDYVKKPIPESVFVQILEKLYEEDIGAGMYALYPYGGIMDEISESAIPFPHRAGILYELWYICSWEKQEDNEKHLNWIRNIYNFMTPYVSQNPRLAYLNYRDLDIGINDPKNPNNYTQARIWGEKYFGKNFDRLVKVKTLVDPNNFFRNEQSIPPLPRHRH

SEQ ID NO: 224 - protein, 523 aa, Artificial Sequence
  source: /note="Description of Artificial Sequence: Synthetic polypeptide"
NIQTSIANPRENFLKCFSQYIPNNATNLKLVYTQNNPLYMSVLNSTIHNLRFSSDTTPKPLVIVTPSHVSHIQGTILCSKKVGLQIRTRSGGHDSEGMSYISQVPFVIVDLRNMRSIKIDVHSQTAWVEAGATLGEVYYWVNEKNESLSLAAGYCPTVCAGGHFGGGGYGPLMRSYGLAADNIIDAHLVNVHGKVLDRKSMGEDLFWALRGGGAESFGIIVAWKIRLVAVPKSTMFSVKKIMEIHELVKLVNKWQNIAYKYDKDLLLMTHFITRNITDNQGKNKTAIHTYFSSVFLGGVDSLVDLMNKSFPELGIKKTDCRQLSWIDTIIFYSGVVNYDTDNFNKEILLDRSAGQNGAFKIKLDYVKKPIPESVFVQILEKLYEEDIGAGMYALYPYGGIMDEISESAIPFPHRAGILYELWYTCSWEKQEDNEKHLNWIRNIYNFMTPYVSQNPRLAYLNYRDLDIGINDPKNPNNYTQARIWGEKYFGKNFDRLVKVKTLVDPNNFFRNEQSIPPLPRHRH

SEQ ID NO: 225 - protein, 523 aa, Artificial Sequence
  source: /note="Description of Artificial Sequence: Synthetic polypeptide"
NIQTSIANPRENFLKCFSQYIPNNATNLKLVYTQNNPLYMSVLNSTIHNLRFSSDTTPKPLVIVTPSHVSHIQGTILCSKKVGLQIRTRSGGHDSEGMSYISQVPFVIVDLRNMRSIKIDVHSQTAWVEAGATLGEVYYWVNEKNESLSLAAGYCPTVCAGGHFGGGGYGPLMRSYGLAADNIIDAHLVNVHGKVLDRKSMGEDLFWALRGGGAESFGIIVAWKIRLVAVPKSTMFSVKKIMEIHELVKLFNKWQNIAYKYDKDLLLMTHFITRNITDNQGKNKTAIHTYFSSVFLGGVDSLVDLMNKSFPELGIKKTDCRQLSWIDTIIFYSGVVNYDTDNFNKEILLDRSAGQNGAFKIKLDYVKKPIPESVFVQILEKLYEEDIGAGMYALYPYGGIMDEISESAIPFPHRAGILYELWYICSWEKQEDNEKHLNWIRNIYNFMTPYVSQNPRLAYLNYRDLDIGINDPKNPNNYTQARIWGEKYFGKNFDRLVKVKTLVDPNNFFRNEQSIPPLPRHRH

SEQ ID NO: 226 - protein, 523 aa, Artificial Sequence
  source: /note="Description of Artificial Sequence: Synthetic polypeptide"
NIQTSIANPRENFLKCFSQYIPNNATNLKLVYTQNNPLYMSVLNSTIHNLRFSSDTTPKPLVIVTPSHVSHIQGTILCSKKVGLQIRTRSGGHDSEGMSYISQVPFVIVDLRNMRSIKIDVHSQTAWVEAGATLGEVYYWVNEKNESLSLAAGYCPTVCAGGHFGGGGYGPLMRSYGLAADNIIDAHLVNVHGKVLDRKSMGEDLFWALRGGGAESFGIIVAWKIRLVAVPKSTMFSVKKIMEIHELVKLVNKWQNIAYKYDKDLLLMTHFITRNITDNQGKNKTAIHTYFSSVFLGGVDSLVDLMNKSFPELGIKKTDCRQLSWIDTIIFYSGVVNYDTDNFNKEILLDRSAGQNGAFKIKLDYVKKPIPESVFVQILEKLYEEDIGAGMYALYPYGGIMDEISESAIPFPHRAGILYELWYICSWEKQEDNEKHLNWVRNIYNFMTPYVSQNPRLAYLNYRDLDIGINDPKNPNNYTQARIWGEKYFGKNFDRLVKVKTLVDPNNFFRNEQSIPPLPRHRH

SEQ ID NO: 227 - protein, 523 aa, Artificial Sequence
  source: /note="Description of Artificial Sequence: Synthetic polypeptide"
NIQTSIANPRENFLKCFSQYIPNNATNLKLVYTQNNPLYMSVLNSTIHNLRFSSDTTPKPLVIVTPSHVSHIQGTILCSKKVGLQIRTRSGGHDSEGMSYISQVPFVIVDLRNMRSIKIDVHSQTAWVEAGATLGEVYYWVNEKNESLSLAGGYCPTVCAGGHFGGGGYGPLMRSYGLAADNIIDAHLVNVHGKVLDRKSMGEDLFWALRGGGAESFGIIVAWKIRLVAVPKSTMFSVKKIMEIHELVKLVNKWQNIAYKYDKDLLLMTHFITRNITDNQGKNKTAIHTYFSSVFLGGVDSLVDLMNKSFPELGIKKTDCRQLSWIDTIIFYSGVVNYDTDNFNKEILLDRSAGQNGAFKIKLDYVKKPIPESVFVQILEKLYEEDIGAGMYALYPYGGIMDEISESAIPFPHRAGILYELWYICSWEKQEDNEKHLNWIRNIYNFMTPYVSQNPRLAYLNYRDLDIGINDPKNPNNYTQARIWGEKYFGKNFDRLVKVKTLVDPNNFFRNEQSIPPLPRHRH

SEQ ID NO: 228 - protein, 523 aa, Artificial Sequence
  source: /note="Description of Artificial Sequence: Synthetic polypeptide"
NIQTSIANPRENFLKCFSQYIPNNATNLKLVYTQNNPLYMSVLNSTIHNLRFSSDTTPKPLVIVTPSHVSHIQGTILCSKKVGLQIRTRSGGHDSEGMSYISQVPFVIVDLRNMRSIKIDVHSQTAWVEAGATLGEVYYWVNEKNESLSLAAGYCPTVCAGGHFGGGGYGPLMRSYGLAADNIIDAHLVNVHGKVLDRKSMGEDLFWALRGGGAESFGIIVAWKIRLVAVPKSTMFSVKKNMEIHELVKLVNKWQNIAYKYDKDLLLMTHFITRNITDNQGKNKTAIHTYFSSVFLGGVDSLVDLMNKSFPELGIKKTDCRQLSWIDTIIFYSGVVNYDTDNFNKEILLDRSAGQNGAFKIKLDYVKKPIPESVFVQILEKLYEEDIGAGMYALYPYGGIMDEISESAIPFPHRAGILYELWYICSWEKQEDNEKHLNWIRNIYNFMTPYVSQNPRLAYLNYRDLDIGINDPKNPNNYTQARIWGEKYFGKNFDRLVKVKTLVDPNNFFRNEQSIPPLPRHRH

SEQ ID NO: 229 - protein, 523 aa, Artificial Sequence
  source: /note="Description of Artificial Sequence: Synthetic polypeptide"
NIQTSIANPRENFLKCFSQYIPNNATNLKLVYTQNNPLYMSVLNSTIHNLRFSSDTTPKPLVIVTPSHVSHIQGTILCSKKVGLQIRTRSGGHDSEGMSYISQVPFVIVDLRNMRSIKIDVHSQTAWVEAGATLGEVYYWVNEKNESLSLAAGYCPTVCAGGHFGGGGYGPLMRSYGLAADNIIDAHLVNVHGKVLDRKSMGEDLFWALRGGGGESFGIIVAWKIRLVAVPKSTMFSVKKIMEIHELVKLVNKWQNIAYKYDKDLLLMTHFITRNITDNQGKNKTAIHTYFSSVFLGGVDSLVDLMNKSFPELGIKKTDCRQLSWIDTIIFYSGVVNYDTDNFNKEILLDRSAGQNGAFKIKLDYVKKPIPESVFVQILEKLYEEDIGAGMYALYPYGGIMDEISESAIPFPHRAGILYELWYICSWEKQEDNEKHLNWIRNIYNFMTPYVSQNPRLAYLNYRDLDIGINDPKNPNNYTQARIWGEKYFGKNFDRLVKVKTLVDPNNFFRNEQSIPPLPRHRH

SEQ ID NO: 230 - protein, 523 aa, Artificial Sequence
  source: /note="Description of Artificial Sequence: Synthetic polypeptide"
NIQTSIANPRENFLKCFSQYIPNNATNLKLVYTQNNPLYMSVLNSTIHNLRFSSDTTPKPLVIVTPSHVSHIQGTILCSKKVGLQIRTRSGGHDSEGMSYISQVPFVIVDLRNMRSIKIDVHSQTAWVEAGATLGEVYYWVNEKNESLSLAAGYCPTVCAGGHFGGGGYGPLMRSYGLAADNIIDAHLVNVHGKVLDRKSMGEDLFWALRGGGAESFGIIVAWKIRLVAVPKSTMFSVKKIMEIHELVKLVNKWQNIAYKYDKDLLLMTHFITRNITDNQGKNKTAIHTYFSSVFHGGVDSLVDLMNKSFPELGIKKTDCRQLSWIDTIIFYSGVVNYDTDNFNKEILLDRSAGQNGAFKIKLDYVKKPIPESVFVQILEKLYEEDIGAGMYALYPYGGIMDEISESAIPFPHRAGILYELWYICSWEKQEDNEKHLNWIRNIYNFMTPYVSQNPRLAYLNYRDLDIGINDPKNPNNYTQARIWGEKYFGKNFDRLVKVKTLVDPNNFFRNEQSIPPLPRHRH

SEQ ID NO: 231 - protein, 523 aa, Artificial Sequence
  source: /note="Description of Artificial Sequence: Synthetic polypeptide"
NIQTSIANPRENFLKCFSQYIPNNATNLKLVYTQNNPLYMSVLNSTIHNLRFSSDTTPKPLVIVTPSHVSHIQGTILCSKKVGLQIRTRSGGHDSEGMSYISQVPFVIVDLRNMRSIKIDVHSQTAWVEAGATLGEVYYWVNEKNESLSLAAGYCPTVCAGGHFGGGGYGPLMRSYGLAADNIIDAHLVNVHGKVLDRKSMGEDLFWALRGGGAESFGIIVAWKIRLVAVPKSTMFSVKKIMEIHELVKLVNKWQNIAYKYDKDLLLMTHFITRNITDNQGKNKTAIHTYFSSVFLGGVDSLVDLMNKSFPELGIKKTDCRQLSWIDTIIFYSGVVNYDTDNFNKEILLDRSAGQNGAFKIKLDYVKKPIPESVFVQILEKLYEEDIGAGMYALYPYGGIMDEISESAIPFPHRAGILYELWYICSWEKQEDNEKHLNWIRNIYNFTTPYVSQNPRLAYLNYRDLDIGINDPKNPNNYTQARIWGEKYFGKNFDRLVKVKTLVDPNNFFRNEQSIPPLPRHRH

SEQ ID NO: 232 - protein, 523 aa, Artificial Sequence
  source: /note="Description of Artificial Sequence: Synthetic polypeptide"
NIQTSIANPRENFLKCFSQYIPNNATNLKLVYTQNNQLYMSVLNSTIHNLRFSSDTTPKPLVIVTPSHVSHIQGTILCSKKVGLQIRTRSGGHDSEGMSYISQVPFVIVDLRNMRSIKIDVHSQTAWVEAGATLGEVYYWVNEKNESLSLAAGYCPTVCAGGHFGGGGYGPLMRSYGLAADNIIDAHLVNVHGKVLDRKSMGEDLFWALRGGGAESFGIIVAWKIRLVAVPKSTMFSVKKIMEIHELVKLVNKWQNIAYKYDKDLLLMTHFITRNITDNQGKNKTAIHTYFSSVFLGGVDSLVDLMNKSFPELGIKKTDCRQLSWIDTIIFYSGVVNYDTDNFNKEILLDRSAGQNGAFKIKLDYVKKPIPESVFVQILEKLYEEDIGAGMYALYPYGGIMDEISESAIPFPHRAGILYELWYICSWEKQEDNEKHLNWIRNIYNFMTPYVSQNPRLAYLNYRDLDIGINDPKNPNNYTQARIWGEKYFGKNFDRLVKVKTLVDPNNFFRNEQSIPPLPRHRH

SEQ ID NO: 233 - protein, 523 aa, Artificial Sequence
  source: /note="Description of Artificial Sequence: Synthetic polypeptide"
NIQTSIANPRENFLKCFSQYIPNNATNLKLVYTQNNPLYMSVLNSTIHNLRFSSDTTPKPLVIVTPSHVSHIQGTILCSKKVGLQIRTRSGGHDSEGMSYISQVPFVIVDLRNMRSIKIDVHSQTAWVEAGATLGEVYYWVNEKNESLSLAAGYCPTVCAGGHFGGGGYGPLMRSYGLAADNIIDAHLVNVHGKVLDRKSMGEDLFWALRGGGAESFGIIVAWKIRLVAVPKSTMFSVKKIMEIHELVKLVNKWQNIAYKYDKDLLLMTHFITRNITDNQGKNKTAIHTYFSSVFLGGVDSLVDLMNKSFPELGIKKTDCRQLSWIDTIIFYSGVVNYDTDNFNKEILLDRSAGQNGAFKIKLDYVKKPIPESVFVQILEKLYEEDIGAGMYALYPYGGIMDEISESAIPFPHRAGILYELWYICSWEKQEDNEKHLNWIRNIYNFMTPYVSQNPRLAYLNYRDLDIGITDPKNPNNYTQARIWGEKYFGKNFDRLVKVKTLVDPNNFFRNEQSIPPLPRHRH

SEQ ID NO: 234 - protein, 523 aa, Artificial Sequence
  source: /note="Description of Artificial Sequence: Synthetic polypeptide"
NIQTSIANPRENFLKCFSQYIPNNATNLKLVYTQNNPLYMSVLNSTIHNLRFSSDTTPKPLVIVTPSHVSHIQGTILCSKKVGLQIRTRSGGHDSEGMSYISQVPFVIVDLRNMRSIKIDVHSQTAWVEAGATLGEVYYWVNEKNESLSLAAGYCPTVCAGGHFGGGGYGPLMRSYGLAADNIIDAHLVNVHGKVLDRKSMGEDLFWALRGGGAESFGIIVAWKIRLVAVPKSTMFSVKKIMEIHELVKLVNKWQNIAYKYDKDLLLMTHFITRNITDNQGKNKTAIHTYFSSVFLGGVDSLVDLMNKSFPELGIKKTDCRQFSWIDTIIFYSGVVNYDTDNFNKEILLDRSAGQNGAFKIKLDYVKKPIPESVFVQILEKLYEEDIGAGMYALYPYGGIMDEISESAIPFPHRAGILYELWYICSWEKQEDNEKHLNWIRNIYNFMTPYVSQNPRLAYLNYRDLDIGINDPKNPNNYTQARIWGEKYFGKNFDRLVKVKTLVDPNNFFRNEQSIPPLPRHRH

SEQ ID NO: 235 - protein, 523 aa, Artificial Sequence
  source: /note="Description of Artificial Sequence: Synthetic polypeptide"
NIQTSIANPRENFLKCFSQYIPNNATNLKLVYTQNNPLYMSVLNSTIHNLRFSSDTTPKPLVIVTPSHVSHIQGTILCSKKVGLQIRTRSGGHDSEGMSYISQVPFVIVDLRNMRSIKIDVHSQTAWVEAGATLGEVYYWVNEKNESFSLAAGYCPTVCAGGHFGGGGYGPLMRSYGLAADNIIDAHLVNVHGKVLDRKSMGEDLFWALRGGGAESFGIIVAWKIRLVAVPKSTMFSVKKIMEIHELVKLVNKWQNIAYKYDKDLLLMTHFITRNITDNQGKNKTAIHTYFSSVFLGGVDSLVDLMNKSFPELGIKKTDCRQLSWIDTIIFYSGVVNYDTDNFNKEILLDRSAGQNGAFKIKLDYVKKPIPESVFVQILEKLYEEDIGAGMYALYPYGGIMDEISESAIPFPHRAGILYELWYICSWEKQEDNEKHLNWIRNIYNFMTPYVSQNPRLAYLNYRDLDIGINDPKNPNNYTQARIWGEKYFGKNFDRLVKVKTLVDPNNFFRNEQSIPPLPRHRH

SEQ ID NO: 236 - protein, 523 aa, Artificial Sequence
  source: /note="Description of Artificial Sequence: Synthetic polypeptide"
NIQTSIANPRENFLKCFSQYIPNNATNLKLVYTQNNPLYMSVLNSTIHNLRFSSDTTPKPLVIVTPSHVSHIQGTILCSKKVGLQIRTRSGGHDSEGMSYISQVPFVIVDLRNMRSIKIDVHSQTAWVEAGATLGEVYYWVNEKNESLSLAAGYCPTVCAGGHFGGGGYGPLMRSYGLAADNIIDAHLVNVHGKVLDRKSMGEDLFWALRGGGAESFGIIVAWKIRLVAVPKSTMFSVKKIMEIHGLVKLVNKWQNIAYKYDKDLLLMTHFITRNITDNQGKNKTAIHTYFSSVFLGGVDSLVDLMNKSFPELGIKKTDCRQLSWIDTIIFYSGVVNYDTDNFNKEILLDRSAGQNGAFKIKLDYVKKPIPESVFVQILEKLYEEDIGAGMYALYPYGGIMDEISESAIPFPHRAGILYELWYICSWEKQEDNEKHLNWIRNIYNFMTPYVSQNPRLAYLNYRDLDIGINDPKNPNNYTQARIWGEKYFGKNFDRLVKVKTLVDPNNFFRNEQSIPPLPRHRH

SEQ ID NO: 237 - protein, 523 aa, Artificial Sequence
  source: /note="Description of Artificial Sequence: Synthetic polypeptide"
NIQTSIANPRENFLKCFSQYIPNNATNLKLVYTQNNPLYMSVLNSTIHNLRFSSDTTPKPLVIVTPSHVSHIQGTILCSKKVGLQIRTRSGGHDSEGMSYISQVPFVIVDLRNMRSIKIDVHSQTAWVEAGATLGEVYYWVNEKNESLSLAAGYCPTVCAGGHFGGGGYGPLMRSYGLAADNIIDAHLVNVHGKVLDRKSMGEDLFWALRGGGAESFGIIVAWKIRLVAVPKSTMFSVKKIMEIHELVKLVNKWQNIAYKYDKDLLLMTHFITRNITDNQGKNKTAIHTYFSSVFLGGVDSLVDLMNKSFPELGIKKTDCRQLSWIDTTIFYSGVVNYDTDNFNKEILLDRSAGQNGAFKIKLDYVKKPIPESVFVQILEKLYEEDIGAGMYALYPYGGIMDEISESAIPFPHRAGILYELWYICSWEKQEDNEKHLNWIRNIYNFMTPYVSQNPRLAYLNYRDLDIGINDPKNPNNYTQARIWGEKYFGKNFDRLVKVKTLVDPNNFFRNEQSIPPLPRHRH

SEQ ID NO: 238 - protein, 523 aa, Unknown; identical to SEQ ID NO: 152
  source: /note="Description of Unknown: control construct sequence"

SEQ ID NO: 239 - protein, 523 aa, Artificial Sequence; identical to SEQ ID NO: 154
  source: /note="Description of Artificial Sequence: Synthetic polypeptide"

SEQ ID NO: 240 - protein, 523 aa, Artificial Sequence; identical to SEQ ID NO: 155
  source: /note="Description of Artificial Sequence: Synthetic polypeptide"

SEQ ID NO: 241 - protein, 523 aa, Artificial Sequence; identical to SEQ ID NO: 164
  source: /note="Description of Artificial Sequence: Synthetic polypeptide"

SEQ ID NO: 242 - protein, 523 aa, Artificial Sequence; identical to SEQ ID NO: 165
  source: /note="Description of Artificial Sequence: Synthetic polypeptide"

SEQ ID NO: 243 - protein, 523 aa, Artificial Sequence; identical to SEQ ID NO: 160
  source: /note="Description of Artificial Sequence: Synthetic polypeptide"

SEQ ID NO: 244 - protein, 523 aa, Artificial Sequence; identical to SEQ ID NO: 162
  source: /note="Description of Artificial Sequence: Synthetic polypeptide"

SEQ ID NO: 245 - protein, 523 aa, Artificial Sequence; identical to SEQ ID NO: 159
  source: /note="Description of Artificial Sequence: Synthetic polypeptide"

SEQ ID NO: 246 - protein, 523 aa, Artificial Sequence; identical to SEQ ID NO: 157
  source: /note="Description of Artificial Sequence: Synthetic polypeptide"

SEQ ID NO: 247 - protein, 524 aa, Artificial Sequence; identical to SEQ ID NO: 156
  source: /note="Description of Artificial Sequence: Synthetic polypeptide"

SEQ ID NO: 248 - protein, 523 aa, Artificial Sequence; identical to SEQ ID NO: 177
  source: /note="Description of Artificial Sequence: Synthetic polypeptide"

SEQ ID NO: 249 - protein, 523 aa, Artificial Sequence; identical to SEQ ID NO: 163
  source: /note="Description of Artificial Sequence: Synthetic polypeptide"

SEQ ID NO: 250 - protein, 523 aa, Artificial Sequence; identical to SEQ ID NO: 153
  source: /note="Description of Artificial Sequence: Synthetic polypeptide"

SEQ ID NO: 251 - protein, 523 aa, Artificial Sequence; identical to SEQ ID NO: 158
  source: /note="Description of Artificial Sequence: Synthetic polypeptide"

SEQ ID NO: 252 - protein, 523 aa, Artificial Sequence; identical to SEQ ID NO: 161
  source: /note="Description of Artificial Sequence: Synthetic polypeptide"

SEQ ID NO: 253 - protein, 523 aa, Artificial Sequence
  source: /note="Description of Artificial Sequence: Synthetic polypeptide"
NIQTSIANPRENFLKCFSQYIPNNATNLKLVYTQNNPLYMSVLNSTIHNLRFSSDTTPKPLVIVTPSHVSHIQATILCSKKVGLQIRTRSGGHDSEGMSYISQVPFVIVDLRNMRSIKIDVHSQTAWVEAGATLGEVYYWVNEKNESLSLAAGYCPTVCAGGHFGGGGYGPLMRSYGLAADNIIDAHLVNVDGKVLDRKSMGEDLFWALRGGGAESFGIIVAWKIRLVAVPKSTMFSVKKIMEIHELVKLVNKWQNIAYKYDKDLLLMTHFITRNITDNQGKNKTAIHTYFSSVFLGGVDSLVDLMNKSFPELGIKKTDCRQLSWIDTIIFYSGVVNYDTDNFNKEILLDRSAGQNGAFKIKLDYVKKPIPESVFVQILEKLYEEDIGAGMYALYPYGGIMDEISESAIPFPHRAGILYELWYICSWEKQEDNEKHLNWIRNIYNFMTPYVSQNPRLAYLNYRDLDIGINDPKNPNNYTQARIWGEKYFGKNFDRLVKVKTLVDPNNFFRNEQSIPPLPRHRH

SEQ ID NO: 254 - protein, 523 aa, Artificial Sequence
  source: /note="Description of Artificial Sequence: Synthetic polypeptide"
NIQTSIANPRENFLKCFSQYIPNNATNLKLVYTQNNPLYMSVLNSTIHNLRFSSDTTPKPLVIVTPSHVSHIQATILCSKKVGLQIRTRSGGHDSEGMSYISQVPFVIVDLRNMRSIKIDVHSQTAWVEAGATLGEVYYWVNEKNESLSLAAGYCPTVCAGGHFGGGGYGPLMRSYGLAADNIIDAHLVNVHGKVLDRKSMGEDLFWALRGGGAESFGIIVAWKIRLVAVPKSTMFSVKKIMEIHELVKLVNKWQNIAYKYDKDLLLMTHFITRNITDNQGKNKTAIHTYFSSVFLGGVDSLVDLMNKSFPELGIKKTDCRQLSWIDTIIFYSGVVNYDTDNFNKEILLDRSAGQNGAFKIKLDYVKKPIPESVFVQILEKLYEEDVGAGMYALYPYGGIMDEISESAIPFPHRAGILYELWYICSWEKQEDNEKHLNWIRNIYNFMTPYVSQNPRLAYLNYRDLDIGINDPKNPNNYTQARIWGEKYFGKNFDRLVKVKTLVDPNNFFRNEQSIPPLPRHRH

SEQ ID NO: 255 - protein, 523 aa, Artificial Sequence
  source: /note="Description of Artificial Sequence: Synthetic polypeptide"
NIQTSIANPRENFLKCFSQYIPNNATNLKLVYTQNNPLYMSVLNSTIHNLRFSSDTTPKPLVIVTPSHVSHIQATILCSKKVGLQIRTRSGGHDSEGMSYISQVPFVIVDLRNMRSIKIDVHSQTAWVEAGATLGEVYYWVNEKNESLSLAAGYCPTVCAGGHFGGGGYGPLMRSYGLAADNIIDAHLVNVHGKVLDRKSMGEDLFWALRGGGAESFGIIVAWKIRLVAVPKSTMFSVKKIMEIHELVKLVNKWQNIAYKYDKDLLLMTHFITRNITDNQGKNKTAIHTYFSSVFLGGVDSLVDLMNKSFPELGIKKTDCRQLSWIDTIIFYSGVVNYDTDNFNKEILLDRSAGQNGAFKIKLDYVKKPIPESVFVQILEKLYEEDIGAGMYALYPYGGIMDEISESAIPFPHRAGILYELWYICSWEKQEDNEKHLNWIRNVYNFMTPYVSQNPRLAYLNYRDLDIGINDPKNPNNYTQARIWGEKYFGKNFDRLVKVKTLVDPNNFFRNEQSIPPLPRHRH

SEQ ID NO: 256 - protein, 523 aa, Artificial Sequence
  source: /note="Description of Artificial Sequence: Synthetic polypeptide"
NIQTSIANPRENFLKCFSQYIPNNATNLKLVYTQNNPLYMSVLNSTIHNLRFSSDTTPKPLVIVTPSHVSHIQATILCSKKVGLQIRTRSGGHDSEGMSYISQVPFVIVDLRNMRSIKIDVHSQTAWVEAGATLGEVYYWVNEKNESLSLAAGYCPTVCAGGHFGGGGYGPLMRSYGLAADNIIDAHLVNVHGKVLDRKSMGEDLFWALRGGGAESFGIIVAWKIRLVAVPKSTMFSVKKIMEIHELVKLVNKWQNIAYKYDKDLLLMTHFITRNITDNQGKNKTAIHTYFSSVFLGGVDSLVDLMNKSFPELGIKKTDCRQLSWIDTIIFYSGVVNYDTDNFNKEILLDRSAGQNGAFKIKLDYVKKPIPESVFVQILEKLYEEDIGAGMYALYPYGGIMDEISESAIPFPHRAGILYELWYICSWEKQEDNEKHLNWIRNIYNFMTPYVSQNPRLAYLNYRDLDLGINDPKNPNNYTQARIWGEKYFGKNFDRLVKVKTLVDPNNFFRNEQSIPPLPRHRH

SEQ ID NO: 257 - protein, 523 aa, Artificial Sequence
  source: /note="Description of Artificial Sequence: Synthetic polypeptide"
NIQTSIANPRENFLKCFSQYIPNNATNLKLVYTQNNPLYMSVLNSTIHNLRFSSDTTPKPLVIVTPSHVSHIQATILCSKKVGLQIRTRSGGHDSEGMSYISQVPFVIVDLRNMRSIKIDVHSQTAWVEAGATLGEVYYWVNEKNESLSLAAGYCPTVCAGGHFGGGGYGPLMRSYGLAADNIIDAHLVNVHGKVLDRKSMGEDLFWAIRGGGAESFGIIVAWKIRLVAVPKSTMFSVKKIMEIHELVKLVNKWQNIAYKYDKDLLLMTHFITRNITDNQGKNKTAIHTYFSSVFLGGVDSLVDLMNKSFPELGIKKTDCRQLSWIDTIIFYSGVVNYDTDNFNKEILLDRSAGQNGAFKIKLDYVKKPIPESVFVQILEKLYEEDIGAGMYALYPYGGIMDEISESAIPFPHRAGILYELWYICSWEKQEDNEKHLNWIRNIYNFMTPYVSQNPRLAYLNYRDLDIGINDPKNPNNYTQARIWGEKYFGKNFDRLVKVKTLVDPNNFFRNEQSIPPLPRHRH

SEQ ID NO: 258 - protein, 523 aa, Artificial Sequence
  source: /note="Description of Artificial Sequence: Synthetic polypeptide"
NIQTSIANPRENFLKCFSQYIPNNATNLKLVYTQNNPLYMSVLNSTIHNLRFSSDTTPKPLVIVTPSHVSHIQATILCSKKVGLQIRTRSGGHDSEGMSYISQVPFVIVDLRNMRSIKIDVHSQTAWVEAGATLGEVYYWVNEKNESLSLAAGYCPTVCAGGHFGGGGYGPLMRSYGLAADNIIDAHLVNVHGKVLDRKSMGEDLFWALRGGGAESFGIIVAWKIRLVAVPKSTIFSVKKIMEIHELVKLVNKWQNIAYKYDKDLLLMTHFITRNITDNQGKNKTAIHTYFSSVFLGGVDSLVDLMNKSFPELGIKKTDCRQLSWIDTIIFYSGVVNYDTDNFNKEILLDRSAGQNGAFKIKLDYVKKPIPESVFVQILEKLYEEDIGAGMYALYPYGGIMDEISESAIPFPHRAGILYELWYICSWEKQEDNEKHLNWIRNIYNFMTPYVSQNPRLAYLNYRDLDIGINDPKNPNNYTQARIWGEKYFGKNFDRLVKVKTLVDPNNFFRNEQSIPPLPRHRH

SEQ ID NO: 259 - protein, 523 aa, Artificial Sequence
  source: /note="Description of Artificial Sequence: Synthetic polypeptide"
NIQTSIANPRENFLKCFSQYIPNNATNLKLVYTQNDPLYMSVLNSTIHNLRFSSDTTPKPLVIVTPSHVSHIQATILCSKKVGLQIRTRSGGHDSEGMSYISQVPFVIVDLRNMRSIKIDVHSQTAWVEAGATLGEVYYWVNEKNESLSLAAGYCPTVCAGGHFGGGGYGPLMRSYGLAADNIIDAHLVNVHGKVLDRKSMGEDLFWALRGGGAESFGIIVAWKIRLVAVPKSTMFSVKKIMEIHELVKLVNKWQNIAYKYDKDLLLMTHFITRNITDNQGKNKTAIHTYFSSVFLGGVDSLVDLMNKSFPELGIKKTDCRQLSWIDTIIFYSGVVNYDTDNFNKEILLDRSAGQNGAFKIKLDYVKKPIPESVFVQILEKLYEEDIGAGMYALYPYGGIMDEISESAIPFPHRAGILYELWYICSWEKQEDNEKHLNWIRNIYNFMTPYVSQNPRLAYLNYRDLDIGINDPKNPNNYTQARIWGEKYFGKNFDRLVKVKTLVDPNNFFRNEQSIPPLPRHRH

SEQ ID NO: 260 - protein, 524 aa, Artificial Sequence
  source: /note="Description of Artificial Sequence: Synthetic polypeptide"
NIQTSIANPRENFLKCFSQYIPNNATNLKLVYTQNNPLYMSVLNSTIHNLRFSSDTTPKPLVIVTPSHVSHIQATILCSKKVGLQIRTRSGGHDSEGMSYISQVPFVIVDLRNMRSIKIDVHSQTAWVEAGATLGEVYYWVNEKNESLSLAAGYCPTVCAGGHFGGGGYGPLMRSYGLAADNIIDAHLVNVHGKVLDRKSMGEDLFWALRGGGAESFGIIVAWKIRLVAVPSKSTMFSVKKIMEIHELVKLVNKWQNIAYKYDKDLLLMTHFITRNITDNQGKNKTAIHTYFSSVFLGGVDSLVDLMNKSFPELGIKKTDCRQLSWIDTIIFYSGVVNYDTDNFNKEILLDRSAGQNGAFKIKLDYVKKPIPESVFVQILEKLYEEDIGAGMYALYPYGGIMDEISESAIPFPHRAGILYELWYICSWEKQEDNEKHLNWIRNIYNFMTPYVSQNPRLAYLNYRDLDIGINDPKNPNNYTQARIWGEKYFGKNFDRLVKVKTLVDPNNFFRNEQSIPPLPRHRH

SEQ ID NO: 261 - protein, 523 aa, Artificial Sequence
  source: /note="Description of Artificial Sequence: Synthetic polypeptide"
NIQTSIANPQENFLKCFSQYIPNNATNLKLVYTQNNPLYMSVLNSTIHNLRFSSDTTPKPLVIVTPSHVSHIQATILCSKKVGLQIRTRSGGHDSEGMSYISQVPFVIVDLRNMRSIKIDVHSQTAWVEAGATLGEVYYWVNEKNESLSLAAGYCPTVCAGGHFGGGGYGPLMRSYGLAADNIIDAHLVNVHGKVLDRKSMGEDLFWALRGGGAESFGIIVAWKIRLVAVPKSTMFSVKKIMEIHELVKLVNKWQNIAYKYDKDLLLMTHFITRNITDNQGKNKTAIHTYFSSVFLGGVDSLVDLMNKSFPELGIKKTDCRQLSWIDTIIFYSGVVNYDTDNFNKEILLDRSAGQNGAFKIKLDYVKKPIPESVFVQILEKLYEEDIGAGMYALYPYGGIMDEISESAIPFPHRAGILYELWYICSWEKQEDNEKHLNWIRNIYNFMTPYVSQNPRLAYLNYRDLDIGINDPKNPNNYTQARIWGEKYFGKNFDRLVKVKTLVDPNNFFRNEQSIPPLPRHRH

SEQ ID NO: 262 - protein, 523 aa, Artificial Sequence
  source: /note="Description of Artificial Sequence: Synthetic polypeptide"
NIQTSIANPRENFLKCFSQYIPNNATNLKLVYTQNNPLYMSVLNSTIHNLRFSSDTTPKPLVIVTPSHVSHIQATILCSKKVGLQIRTRSGGHDAEGMSYISQVPFVIVDLRNMRSIKIDVHSQTAWVEAGATLGEVYYWVNEKNESLSLAAGYCPTVCAGGHFGGGGYGPLMRSYGLAADNIIDAHLVNVHGKVLDRKSMGEDLFWALRGGGAESFGIIVAWKIRLVAVPKSTMFSVKKIMEIHELVKLVNKWQNIAYKYDKDLLLMTHFITRNITDNQGKNKTAIHTYFSSVFLGGVDSLVDLMNKSFPELGIKKTDCRQLSWIDTIIFYSGVVNYDTDNFNKEILLDRSAGQNGAFKIKLDYVKKPIPESVFVQILEKLYEEDIGAGMYALYPYGGIMDEISESAIPFPHRAGILYELWYICSWEKQEDNEKHLNWIRNIYNFMTPYVSQNPRLAYLNYRDLDIGINDPKNPNNYTQARIWGEKYFGKNFDRLVKVKTLVDPNNFFRNEQSIPPLPRHRH

SEQ ID NO: 263 - protein, 523 aa, Artificial Sequence
  source: /note="Description of Artificial Sequence: Synthetic polypeptide"
NIQTSIANPRENFLKCFSQYIPNNATNLKLVYTQNNPLYMSVLNSTIHNLRFSSDTTPKPLVIVTPSHVSHIQATILCSKKVGLQIRTRSGGHDSEGMSYISQVPFVIVDLRNMRSIKIDVHSQTAWVEAGATLGEVYYWVNEKNESLSLAAGYCPTVCAGGHFGGGGYGPLMRSYGLAADNIIDAHLVNVHGKVLDRKSMGEDLFWALRGGGAENFGIIVAWKIRLVAVPKSTMFSVKKIMEIHELVKLVNKWQNIAYKYDKDLLLMTHFITRNITDNQGKNKTAIHTYFSSVFLGGVDSLVDLMNKSFPELGIKKTDCRQLSWIDTIIFYSGVVNYDTDNFNKEILLDRSAGQNGAFKIKLDYVKKPIPESVFVQILEKLYEEDIGAGMYALYPYGGIMDEISESAIPFPHRAGILYELWYICSWEKQEDNEKHLNWIRNIYNFMTPYVSQNPRLAYLNYRDLDIGINDPKNPNNYTQARIWGEKYFGKNFDRLVKVKTLVDPNNFFRNEQSIPPLPRHRH

SEQ ID NO: 264 - protein, 523 aa, Artificial Sequence
  source: /note="Description of Artificial Sequence: Synthetic polypeptide"
NIQTSIANPRENFLKCFSQYIPNNATNLKLVYTQNNPLYMSVLNSTIHNLRFSSDTTPKPLVIVTPSHVSHIQATILCSKKVGLQIRTRSGGHDSEGMSYISQVPFVIVDLRNMRSIKIDVHSQTAWVEAGATLGEVYYWVNEKNESLSLAAGYCPTVCAGGHFGGGGYGPLMRSYGLAADNIIDAHLVNVHGKVLDRKSMGEDLFWALRGGGAESFGIIAAWKIRLVAVPKSTMFSVKKIMEIHELVKLVNKWQNIAYKYDKDLLLMTHFITRNITDNQGKNKTAIHTYFSSVFLGGVDSLVDLMNKSFPELGIKKTDCRQLSWIDTIIFYSGVVNYDTDNFNKEILLDRSAGQNGAFKIKLDYVKKPIPESVFVQILEKLYEEDIGAGMYALYPYGGIMDEISESAIPFPHRAGILYELWYICSWEKQEDNEKHLNWIRNIYNFMTPYVSQNPRLAYLNYRDLDIGINDPKNPNNYTQARIWGEKYFGKNFDRLVKVKTLVDPNNFFRNEQSIPPLPRHRH

SEQ ID NO: 265 - protein, 523 aa, Artificial Sequence
  source: /note="Description of Artificial Sequence: Synthetic polypeptide"
NIQTSIANPRENFLKCFSQYIPNNATNLKLVYTQNNPLYMSVLNSTIHNLRFSSDTTPKPLVIVTPSHVSHIQATILCSKKVGLQIRTRSGGHDSEGMSYISQVPFVIVDLRNMRSIKIDVHSQTAWVEAGATLGEVYYWVNEKNESLSLAAGYCPTVCAGGHFGGGGYGPLMRSYGLAADNIIDAHLVNVHGKVLDRKSMGEDLFWALRGGGAESFGIIVAWKIRLVAVPKSTMFSVKKIMEIHELVKLVNKWQNIAYKYDKDLLLMTHFITRNITDNQGKNKTAIHTYFSSVFLGGVDSLVDLMNKSFPELGIKKTDCRQLSWIDTIIFYSGVVNFDTDNFNKEILLDRSAGQNGAFKIKLDYVKKPIPESVFVQILEKLYEEDIGAGMYALYPYGGIMDEISESAIPFPHRAGILYELWYICSWEKQEDNEKHLNWIRNIYNFMTPYVSQNPRLAYLNYRDLDIGINDPKNPNNYTQARIWGEKYFGKNFDRLVKVKTLVDPNNFFRNEQSIPPLPRHRH

SEQ ID NO: 266 - protein, 523 aa, Artificial Sequence
  source: /note="Description of Artificial Sequence: Synthetic polypeptide"
NIQTSIANPRENFLKCFSQYIPNNATNLKLVYTQNNPLYMSVLNSTIHNLRFSSDTTPKPLVIVTPSHVSHIQGTILCSKKVGLQIRTRSGGHDSEGMSYISQVPFVIVDLRNMRSIKIDVHSQTAWVEAGATLGEVYYWVNEKNESLSLAAGYCPTVCAGGHFGGGGYGPLMRSYGLAADNIIDAHLVNVDGKVLDRKSMGEDLFWALRGGGAESFGIIVAWKIRLVAVPKSTIFSVKKIMEIHELVKLVNKWQNIAYKYDKDLLLMTHFITRNITDNQGKNKTAIHTYFSSVFLGGVDSLVDLMNKSFPELGIKKTDCRQLSWIDTIIFYSGVVNYDTDNFNKEILLDRSAGQNGAFKIKLDYVKKPIPESVFVQILEKLYEEDIGAGMYALYPYGGIMDEISESAIPFPHRAGILYELWYICSWEKQEDNEKHLNWIRNIYNFMTPYVSQNPRLAYLNYRDLDIGINDPKNPNNYTQARIWGEKYFGKNFDRLVKVKTLVDPNNFFRNEQSIPPLPRHRH

SEQ ID NO: 267 - protein, 523 aa, Artificial Sequence
  source: /note="Description of Artificial Sequence: Synthetic polypeptide"
NIQTSIANPRENFLKCFSQYIPNNATNLKLVYTQNDPLYMSVLNSTIHNLRFSSDTTPKPLVIVTPSHVSHIQGTILCSKKVGLQIRTRSGGHDSEGMSYISQVPFVIVDLRNMRSIKIDVHSQTAWVEAGATLGEVYYWVNEKNESLSLAAGYCPTVCAGGHFGGGGYGPLMRSYGLAADNIIDAHLVNVDGKVLDRKSMGEDLFWALRGGGAESFGIIVAWKIRLVAVPKSTMFSVKKIMEIHELVKLVNKWQNIAYKYDKDLLLMTHFITRNITDNQGKNKTAIHTYFSSVFLGGVDSLVDLMNKSFPELGIKKTDCRQLSWIDTIIFYSGVVNYDTDNFNKEILLDRSAGQNGAFKIKLDYVKKPIPESVFVQILEKLYEEDIGAGMYALYPYGGIMDEISESAIPFPHRAGILYELWYICSWEKQEDNEKHLNWIRNIYNFMTPYVSQNPRLAYLNYRDLDIGINDPKNPNNYTQARIWGEKYFGKNFDRLVKVKTLVDPNNFFRNEQSIPPLPRHRH

SEQ ID NO: 268 - protein, 523 aa, Artificial Sequence
  source: /note="Description of Artificial Sequence: Synthetic polypeptide"
NIQTSIANPRENFLKCFSQYIPNNATNLKLVYTQNNPLYMSVLNSTIHNLRFSSDTTPKPLVIVTPSHVSHIQGTILCSKKVGLQIRTRSGGHDSEGMSYISQVPFVIVDLRNMRSIKIDVHSQTAWVEAGATLGEVYYWVNEKNESLSLAAGYCPTVCAGGHFGGGGYGPLMRSYGLAADNIIDAHLVNVDGKVLDRKSMGEDLFWALRGGGAESFGIIAAWKIRLVAVPKSTMFSVKKIMEIHELVKLVNKWQNIAYKYDKDLLLMTHFITRNITDNQGKNKTAIHTYFSSVFLGGVDSLVDLMNKSFPELGIKKTDCRQLSWIDTIIFYSGVVNYDTDNFNKEILLDRSAGQNGAFKIKLDYVKKPIPESVFVQILEKLYEEDIGAGMYALYPYGGIMDEISESAIPFPHRAGILYELWYICSWEKQEDNEKHLNWIRNIYNFMTPYVSQNPRLAYLNYRDLDIGINDPKNPNNYTQARIWGEKYFGKNFDRLVKVKTLVDPNNFFRNEQSIPPLPRHRH

SEQ ID NO: 269 - protein, 523 aa, Artificial Sequence
  source: /note="Description of Artificial Sequence: Synthetic polypeptide"
NIQTSIANPRENFLKCFSQYIPNNATNLKLVYTQNDPLYMSVLNSTIHNLRFSSDTTPKPLVIVTPSHVSHIQGTILCSKKVGLQIRTRSGGHDSEGMSYISQVPFVIVDLRNMRSIKIDVHSQTAWVEAGATLGEVYYWVNEKNESLSLAAGYCPTVCAGGHFGGGGYGPLMRSYGLAADNIIDAHLVNVHGKVLDRKSMGEDLFWALRGGGAESFGIIVAWKIRLVAVPKSTIFSVKKIMEIHELVKLVNKWQNIAYKYDKDLLLMTHFITRNITDNQGKNKTAIHTYFSSVFLGGVDSLVDLMNKSFPELGIKKTDCRQLSWIDTIIFYSGVVNYDTDNFNKEILLDRSAGQNGAFKIKLDYVKKPIPESVFVQILEKLYEEDIGAGMYALYPYGGIMDEISESAIPFPHRAGILYELWYICSWEKQEDNEKHLNWIRNIYNFMTPYVSQNPRLAYLNYRDLDIGINDPKNPNNYTQARIWGEKYFGKNFDRLVKVKTLVDPNNFFRNEQSIPPLPRHRH

SEQ ID NO: 270 - protein, 524 aa, Artificial Sequence
  source: /note="Description of Artificial Sequence: Synthetic polypeptide"
NIQTSIANPRENFLKCFSQYIPNNATNLKLVYTQNNPLYMSVLNSTIHNLRFSSDTTPKPLVIVTPSHVSHIQGTILCSKKVGLQIRTRSGGHDSEGMSYISQVPFVIVDLRNMRSIKIDVHSQTAWVEAGATLGEVYYWVNEKNESLSLAAGYCPTVCAGGHFGGGGYGPLMRSYGLAADNIIDAHLVNVDGKVLDRKSMGEDLFWALRGGGAESFGIIVAWKIRLVAVPSKSTMFSVKKIMEIHELVKLVNKWQNIAYKYDKDLLLMTHFITRNITDNQGKNKTAIHTYFSSVFLGGVDSLVDLMNKSFPELGIKKTDCRQLSWIDTIIFYSGVVNYDTDNFNKEILLDRSAGQNGAFKIKLDYVKKPIPESVFVQILEKLYEEDIGAGMYALYPYGGIMDEISESAIPFPHRAGILYELWYICSWEKQEDNEKHLNWIRNIYNFMTPYVSQNPRLAYLNYRDLDIGINDPKNPNNYTQARIWGEKYFGKNFDRLVKVKTLVDPNNFFRNEQSIPPLPRHRH

SEQ ID NO: 271 - protein, 524 aa, Artificial Sequence
  source: /note="Description of Artificial Sequence: Synthetic polypeptide"
NIQTSIANPRENFLKCFSQYIPNNATNLKLVYTQNDPLYMSVLNSTIHNLRFSSDTTPKPLVIVTPSHVSHIQGTILCSKKVGLQIRTRSGGHDSEGMSYISQVPFVIVDLRNMRSIKIDVHSQTAWVEAGATLGEVYYWVNEKNESLSLAAGYCPTVCAGGHFGGGGYGPLMRSYGLAADNIIDAHLVNVHGKVLDRKSMGEDLFWALRGGGAESFGIIVAWKIRLVAVPSKSTMFSVKKIMEIHELVKLVNKWQNIAYKYDKDLLLMTHFITRNITDNQGKNKTAIHTYFSSVFLGGVDSLVDLMNKSFPELGIKKTDCRQLSWIDTIIFYSGVVNYDTDNFNKEILLDRSAGQNGAFKIKLDYVKKPIPESVFVQILEKLYEEDIGAGMYALYPYGGIMDEISESAIPFPHRAGILYELWYICSWEKQEDNEKHLNWIRNIYNFMTPYVSQNPRLAYLNYRDLDIGINDPKNPNNYTQARIWGEKYFGKNFDRLVKVKTLVDPNNFFRNEQSIPPLPRHRH

SEQ ID NO: 272 - protein, 524 aa, Artificial Sequence
  source: /note="Description of Artificial Sequence: Synthetic polypeptide"
NIQTSIANPRENFLKCFSQYIPNNATNLKLVYTQNNPLYMSVLNSTIHNLRFSSDTTPKPLVIVTPSHVSHIQGTILCSKKVGLQIRTRSGGHDSEGMSYISQVPFVIVDLRNMRSIKIDVHSQTAWVEAGATLGEVYYWVNEKNESLSLAAGYCPTVCAGGHFGGGGYGPLMRSYGLAADNIIDAHLVNVHGKVLDRKSMGEDLFWALRGGGAESFGIIVAWKIRLVAVPSKSIMFSVKKIMEIHELVKLVNKWQNIAYKYDKDLLLMTHFITRNITDNQGKNKTAIHTYFSSVFLGGVDSLVDLMNKSFPELGIKKTDCRQLSWIDTIIFYSGVVNYDTDNFNKEILLDRSAGQNGAFKIKLDYVKKPIPESVFVQILEKLYEEDIGAGMYALYPYGGIMDEISESAIPFPHRAGILYELWYICSWEKQEDNEKHLNWIRNIYNFMTPYVSQNPRLAYLNYRDLDIGINDPKNPNNYTQARIWGEKYFGKNFDRLVKVKTLVDPNNFFRNEQSIPPLPRHRH

SEQ ID NO: 273 - protein, 524 aa, Artificial Sequence
  source: /note="Description of Artificial Sequence: Synthetic polypeptide"
NIQTSIANPRENFLKCFSQYIPNNATNLKLVYTQNNPLYMSVLNSTIHNLRFSSDTTPKPLVIVTPSHVSHIQGTILCSKKVGLQIRTRSGGHDSEGMSYISQVPFVIVDLRNMRSIKIDVHSQTAWVEAGATLGEVYYWVNEKNESLSLAAGYCPTVCAGGHFGGGGYGPLMRSYGLAADNIIDAHLVNVHGKVLDRKSMGEDLFWALRGGGAESFGIIAAWKIRLVAVPSKSTMFSVKKIMEIHELVKLVNKWQNIAYKYDKDLLLMTHFITRNITDNQGKNKTAIHTYFSSVFLGGVDSLVDLMNKSFPELGIKKTDCRQLSWIDTIIFYSGVVNYDTDNFNKEILLDRSAGQNGAFKIKLDYVKKPIPESVFVQILEKLYEEDIGAGMYALYPYGGIMDEISESAIPFPHRAGILYELWYICSWEKQEDNEKHLNWIRNIYNFMTPYVSQNPRLAYLNYRDLDIGINDPKNPNNYTQARIWGEKYFGKNFDRLVKVKTLVDPNNFFRNEQSIPPLPRHRH

SEQ ID NO: 274 - protein, 523 aa, Artificial Sequence
  source: /note="Description of Artificial Sequence: Synthetic polypeptide"
NIQTSIANPRENFLKCFSQYIPNNATNLKLVYTQNNPLYMSVLNSTIHNLRFSSDTTPKPLVIVTPSHVSHIQGTILCSKKVGLQIRTRSGGHDSEGMSYISQVPFVIVDLRNMRSIKIDVHSQTAWVEAGATLGEVYYWVNEKNESLSLAAGYCPTVCAGGHFGGGGYGPLMRSYGLAADNIIDAHLVNVDGKVLDRKSMGEDLFWALRGGGAENFGIIVAWKIRLVAVPKSTMFSVKKIMEIHELVKLVNKWQNIAYKYDKDLLLMTHFITRNITDNQGKNKTAIHTYFSSVFLGGVDSLVDLMNKSFPELGIKKTDCRQLSWIDTIIFYSGVVNYDTDNFNKEILLDRSAGQNGAFKIKLDYVKKPIPESVFVQILEKLYEEDIGAGMYALYPYGGIMDEISESAIPFPHRAGILYELWYICSWEKQEDNEKHLNWIRNIYNFMTPYVSQNPRLAYLNYRDLDIGINDPKNPNNYTQARIWGEKYFGKNFDRLVKVKTLVDPNNFFRNEQSIPPLPRHRH

SEQ ID NO: 275 - protein, 523 aa, Artificial Sequence
  source: /note="Description of Artificial Sequence: Synthetic polypeptide"
NIQTSIANPRENFLKCFSQYIPNNATNLKLVYTQNNPLYMSVLNSTIHNLRFSSDTTPKPLVIVTPSHVSHIQGTILCSKKVGLQIRTRSGGHDSEGMSYISQVPFVIVDLRNMRSIKIDVHSQTAWVEAGATLGEVYYWVNEKNESLSLAAGYCPTVCAGGHFGGGGYGPLMRSYGLAADNIIDAHLVNVHGKVLDRKSMGEDLFWALRGGGAENFGIIVAWKIRLVAVPKSTMFSVKKIMEIHELVKLVNKWQNIAYKYDKDLLLMTHFITRNITDNQGKNKTAIHTYFSSVFLGGVDSLVDLMNKSFPELGIKKTDCRQLSWIDTIIFYSGVVNYDTDNFNKEILLDRSAGQNGAFKIKLDYVKKPIPESVFVQILEKLYEEDVGAGMYALYPYGGIMDEISESAIPFPHRAGILYELWYICSWEKQEDNEKHLNWIRNIYNFMTPYVSQNPRLAYLNYRDLDIGINDPKNPNNYTQARIWGEKYFGKNFDRLVKVKTLVDPNNFFRNEQSIPPLPRHRH

SEQ ID NO: 276 - protein, 523 aa, Artificial Sequence
  source: /note="Description of Artificial Sequence: Synthetic polypeptide"
NIQTSIANPRENFLKCFSQYIPNNATNLKLVYTQNNPLYMSVLNSTIHNLRFSSDTTPKPLVIVTPSHVSHIQGTILCSKKVGLQIRTRSGGHDSEGMSYISQVPFVIVDLRNMRSIKIDVHSQTAWVEAGATLGEVYYWVNEKNESLSLAAGYCPTVCAGGHFGGGGYGPLMRSYGLAADNIIDAHLVNVHGKVLDRKSMGEDLFWALRGGGAENFGIIVAWKIRLVAVPKSTMFSVKKIMEIHELVKLVNKWQNIAYKYDKDLLLMTHFITRNITDNQGKNKTAIHTYFSSVFLGGVDSLVDLMNKSFPELGIKKTDCRQLSWIDTIIFYSGVVNYDTDNFNKEILLDRSAGQNGAFKIKLDYVKKPIPESVFVQILEKLYEEDIGAGMYALYPYGGIMDEISESAIPFPHRAGILYELWYICSWEKQEDNEKHLNWIRNVYNFMTPYVSQNPRLAYLNYRDLDIGINDPKNPNNYTQARIWGEKYFGKNFDRLVKVKTLVDPNNFFRNEQSIPPLPRHRH

SEQ ID NO: 277 - protein, 523 aa, Artificial Sequence
  source: /note="Description of Artificial Sequence: Synthetic polypeptide"
NIQTSIANPRENFLKCFSQYIPNNATNLKLVYTQNNPLYMSVLNSTIHNLRFSSDTTPKPLVIVTPSHVSHIQGTILCSKKVGLQIRTRSGGHDSEGMSYISQVPFVIVDLRNMRSIKIDVHSQTAWVEAGATLGEVYYWVNEKNESLSLAAGYCPTVCAGGHFGGGGYGPLMRSYGLAADNIIDAHLVNVHGKVLDRKSMGEDLFWALRGGGAENFGIIVAWKIRLVAVPKSTMFSVKKIMEIHELVKLVNKWQNIAYKYDKDLLLMTHFITRNITDNQGKNKTAIHTYFSSVFLGGVDSLVDLMNKSFPELGIKKTDCRQLSWIDTIIFYSGVVNYDTDNFNKEILLDRSAGQNGAFKIKLDYVKKPIPESVFVQILEKLYEEDIGAGMYALYPYGGIMDEISESAIPFPHRAGILYELWYICSWEKQEDNEKHLNWIRNIYNFMTPYVSQNPRLAYLNYRDLDLGINDPKNPNNYTQARIWGEKYFGKNFDRLVKVKTLVDPNNFFRNEQSIPPLPRHRH

SEQ ID NO: 278 - protein, 523 aa, Artificial Sequence
  source: /note="Description of Artificial Sequence: Synthetic polypeptide"
NIQTSIANPRENFLKCFSQYIPNNATNLKLVYTQNNPLYMSVLNSTIHNLRFSSDTTPKPLVIVTPSHVSHIQGTILCSKKVGLQIRTRSGGHDSEGMSYISQVPFVIVDLRNMRSIKIDVHSQTAWVEAGATLGEVYYWVNEKNESLSLAAGYCPTVCAGGHFGGGGYGPLMRSYGLAADNIIDAHLVNVHGKVLDRKSMGEDLFWAIRGGGAENFGIIVAWKIRLVAVPKSTMFSVKKIMEIHELVKLVNKWQNIAYKYDKDLLLMTHFITRNITDNQGKNKTAIHTYFSSVFLGGVDSLVDLMNKSFPELGIKKTDCRQLSWIDTIIFYSGVVNYDTDNFNKEILLDRSAGQNGAFKIKLDYVKKPIPESVFVQILEKLYEEDIGAGMYALYPYGGIMDEISESAIPFPHRAGILYELWYICSWEKQEDNEKHLNWIRNIYNFMTPYVSQNPRLAYLNYRDLDIGINDPKNPNNYTQARIWGEKYFGKNFDRLVKVKTLVDPNNFFRNEQSIPPLPRHRH

SEQ ID NO: 279 - protein, 523 aa, Artificial Sequence
  source: /note="Description of Artificial Sequence: Synthetic polypeptide"
NIQTSIANPRENFLKCFSQYIPNNATNLKLVYTQNNPLYMSVLNSTIHNLRFSSDTTPKPLVIVTPSHVSHIQGTILCSKKVGLQIRTRSGGHDSEGMSYISQVPFVIVDLRNMRSIKIDVHSQTAWVEAGATLGEVYYWVNEKNESLSLAAGYCPTVCAGGHFGGGGYGPLMRSYGLAADNIIDAHLVNVHGKVLDRKSMGEDLFWALRGGGAENFGIIVAWKIRLVAVPKSTIFSVKKIMEIHELVKLVNKWQNIAYKYDKDLLLMTHFITRNITDNQGKNKTAIHTYFSSVFLGGVDSLVDLMNKSFPELGIKKTDCRQLSWIDTIIFYSGVVNYDTDNFNKEILLDRSAGQNGAFKIKLDYVKKPIPESVFVQILEKLYEEDIGAGMYALYPYGGIMDEISESAIPFPHRAGILYELWYICSWEKQEDNEKHLNWIRNIYNFMTPYVSQNPRLAYLNYRDLDIGINDPKNPNNYTQARIWGEKYFGKNFDRLVKVKTLVDPNNFFRNEQSIPPLPRHRH

SEQ ID NO: 280 - protein, 523 aa, Artificial Sequence
  source: /note="Description of Artificial Sequence: Synthetic polypeptide"
NIQTSIANPRENFLKCFSQYIPNNATNLKLVYTQNDPLYMSVLNSTIHNLRFSSDTTPKPLVIVTPSHVSHIQGTILCSKKVGLQIRTRSGGHDSEGMSYISQVPFVIVDLRNMRSIKIDVHSQTAWVEAGATLGEVYYWVNEKNESLSLAAGYCPTVCAGGHFGGGGYGPLMRSYGLAADNIIDAHLVNVHGKVLDRKSMGEDLFWALRGGGAENFGIIVAWKIRLVAVPKSTMFSVKKIMEIHELVKLVNKWQNIAYKYDKDLLLMTHFITRNITDNQGKNKTAIHTYFSSVFLGGVDSLVDLMNKSFPELGIKKTDCRQLSWIDTIIFYSGVVNYDTDNFNKEILLDRSAGQNGAFKIKLDYVKKPIPESVFVQILEKLYEEDIGAGMYALYPYGGIMDEISESAIPFPHRAGILYELWYICSWEKQEDNEKHLNWIRNIYNFMTPYVSQNPRLAYLNYRDLDIGINDPKNPNNYTQARIWGEKYFGKNFDRLVKVKTLVDPNNFFRNEQSIPPLPRHRH

SEQ ID NO: 281 - protein, 524 aa, Artificial Sequence
  source: /note="Description of Artificial Sequence: Synthetic polypeptide"
NIQTSIANPRENFLKCFSQYIPNNATNLKLVYTQNNPLYMSVLNSTIHNLRFSSDTTPKPLVIVTPSHVSHIQGTILCSKKVGLQIRTRSGGHDSEGMSYISQVPFVIVDLRNMRSIKIDVHSQTAWVEAGATLGEVYYWVNEKNESLSLAAGYCPTVCAGGHFGGGGYGPLMRSYGLAADNIIDAHLVNVHGKVLDRKSMGEDLFWALRGGGAENFGIIVAWKIRLVAVPSKSTMFSVKKIMEIHELVKLVNKWQNIAYKYDKDLLLMTHFITRNITDNQGKNKTAIHTYFSSVFLGGVDSLVDLMNKSFPELGIKKTDCRQLSWIDTIIFYSGVVNYDTDNFNKEILLDRSAGQNGAFKIKLDYVKKPIPESVFVQILEKLYEEDIGAGMYALYPYGGIMDEISESAIPFPHRAGILYELWYICSWEKQEDNEKHLNWIRNIYNFMTPYVSQNPRLAYLNYRDLDIGINDPKNPNNYTQARIWGEKYFGKNFDRLVKVKTLVDPNNFFRNEQSIPPLPRHRH

SEQ ID NO: 282 - protein, 523 aa, Artificial Sequence
  source: /note="Description of Artificial Sequence: Synthetic polypeptide"
NIQTSIANPQENFLKCFSQYIPNNATNLKLVYTQNNPLYMSVLNSTIHNLRFSSDTTPKPLVIVTPSHVSHIQGTILCSKKVGLQIRTRSGGHDSEGMSYISQVPFVIVDLRNMRSIKIDVHSQTAWVEAGATLGEVYYWVNEKNESLSLAAGYCPTVCAGGHFGGGGYGPLMRSYGLAADNIIDAHLVNVHGKVLDRKSMGEDLFWALRGGGAENFGIIVAWKIRLVAVPKSTMFSVKKIMEIHELVKLVNKWQNIAYKYDKDLLLMTHFITRNITDNQGKNKTAIHTYFSSVFLGGVDSLVDLMNKSFPELGIKKTDCRQLSWIDTIIFYSGVVNYDTDNFNKEILLDRSAGQNGAFKIKLDYVKKPIPESVFVQILEKLYEEDIGAGMYALYPYGGIMDEISESAIPFPHRAGILYELWYICSWEKQEDNEKHLNWIRNIYNFMTPYVSQNPRLAYLNYRDLDIGINDPKNPNNYTQARIWGEKYFGKNFDRLVKVKTLVDPNNFFRNEQSIPPLPRHRH

SEQ ID NO: 283 - protein, 523 aa, Artificial Sequence
  source: /note="Description of Artificial Sequence: Synthetic polypeptide"
NIQTSIANPRENFLKCFSQYIPNNATNLKLVYTQNNPLYMSVLNSTIHNLRFSSDTTPKPLVIVTPSHVSHIQGTILCSKKVGLQIRTRSGGHDAEGMSYISQVPFVIVDLRNMRSIKIDVHSQTAWVEAGATLGEVYYWVNEKNESLSLAAGYCPTVCAGGHFGGGGYGPLMRSYGLAADNIIDAHLVNVHGKVLDRKSMGEDLFWALRGGGAENFGIIVAWKIRLVAVPKSTMFSVKKIMEIHELVKLVNKWQNIAYKYDKDLLLMTHFITRNITDNQGKNKTAIHTYFSSVFLGGVDSLVDLMNKSFPELGIKKTDCRQLSWIDTIIFYSGVVNYDTDNFNKEILLDRSAGQNGAFKIKLDYVKKPIPESVFVQILEKLYEEDIGAGMYALYPYGGIMDEISESAIPFPHRAGILYELWYICSWEKQEDNEKHLNWIRNIYNFMTPYVSQNPRLAYLNYRDLDIGINDPKNPNNYTQARIWGEKYFGKNFDRLVKVKTLVDPNNFFRNEQSIPPLPRHRH

SEQ ID NO: 284 - protein, 523 aa, Artificial Sequence
  source: /note="Description of Artificial Sequence: Synthetic polypeptide"
NIQTSIANPRENFLKCFSQYIPNNATNLKLVYTQNNPLYMSVLNSTIHNLRFSSDTTPKPLVIVTPSHVSHIQGTILCSKKVGLQIRTRSGGHDSEGMSYISQVPFVIVDLRNMRSIKIDVHSQTAWVEAGATLGEVYYWVNEKNESLSLAAGYCPTVCAGGHFGGGGYGPLMRSYGLAADNIIDAHLVNVHGKVLDRKSMGEDLFWALRGGGAENFGIIAAWKIRLVAVPKSTMFSVKKIMEIHELVKLVNKWQNIAYKYDKDLLLMTHFITRNITDNQGKNKTAIHTYFSSVFLGGVDSLVDLMNKSFPELGIKKTDCRQLSWIDTIIFYSGVVNYDTDNFNKEILLDRSAGQNGAFKIKLDYVKKPIPESVFVQILEKLYEEDIGAGMYALYPYGGIMDEISESAIPFPHRAGILYELWYICSWEKQEDNEKHLNWIRNIYNFMTPYVSQNPRLAYLNYRDLDIGINDPKNPNNYTQARIWGEKYFGKNFDRLVKVKTLVDPNNFFRNEQSIPPLPRHRH

SEQ ID NO: 285 - protein, 523 aa, Artificial Sequence
  source: /note="Description of Artificial Sequence: Synthetic polypeptide"
NIQTSIANPRENFLKCFSQYIPNNATNLKLVYTQNNPLYMSVLNSTIHNLRFSSDTTPKPLVIVTPSHVSHIQGTILCSKKVGLQIRTRSGGHDSEGMSYISQVPFVIVDLRNMRSIKIDVHSQTAWVEAGATLGEVYYWVNEKNESLSLAAGYCPTVCAGGHFGGGGYGPLMRSYGLAADNIIDAHLVNVHGKVLDRKSMGEDLFWALRGGGAENFGIIVAWKIRLVAVPKSTMFSVKKIMEIHELVKLVNKWQNIAYKYDKDLLLMTHFITRNITDNQGKNKTAIHTYFSSVFLGGVDSLVDLMNKSFPELGIKKTDCRQLSWIDTIIFYSGVVNFDTDNFNKEILLDRSAGQNGAFKIKLDYVKKPIPESVFVQILEKLYEEDIGAGMYALYPYGGIMDEISESAIPFPHRAGILYELWYICSWEKQEDNEKHLNWIRNIYNFMTPYVSQNPRLAYLNYRDLDIGINDPKNPNNYTQARIWGEKYFGKNFDRLVKVKTLVDPNNFFRNEQSIPPLPRHRH

SEQ ID NO: 286 - protein, 523 aa, Artificial Sequence
  source: /note="Description of Artificial Sequence: Synthetic polypeptide"
NIQTSIANPRENFLKCFSQYIPNNATNLKLVYTQNNPLYMSVLNSTIHNLRFSSDTTPKPLVIVTPSHVSHIQGTILCSKKVGLQIRTRSGGHDSEGMSYISQVPFVIVDLRNMRSIKIDVHSQTAWVEAGATLGEVYYWVNEKNESLSLAAGYCPTVCAGGHFGGGGYGPLMRSYGLAADNIIDAHLVNVHGKVLDRKSMGEDLFWALRGGGAESFGIIAAWKIRLVAVPKSTIFSVKKIMEIHELVKLVNKWQNIAYKYDKDLLLMTHFITRNITDNQGKNKTAIHTYFSSVFLGGVDSLVDLMNKSFPELGIKKTDCRQLSWIDTIIFYSGVVNYDTDNFNKEILLDRSAGQNGAFKIKLDYVKKPIPESVFVQILEKLYEEDIGAGMYALYPYGGIMDEISESAIPFPHRAGILYELWYICSWEKQEDNEKHLNWIRNIYNFMTPYVSQNPRLAYLNYRDLDIGINDPKNPNNYTQARIWGEKYFGKNFDRLVKVKTLVDPNNFFRNEQSIPPLPRHRH

SEQ ID NO: 287 - protein, 523 aa, Artificial Sequence
  source: /note="Description of Artificial Sequence: Synthetic polypeptide"
NIQTSIANPRENFLKCFSQYIPNNATNLKLVYTQNDPLYMSVLNSTIHNLRFSSDTTPKPLVIVTPSHVSHIQGTILCSKKVGLQIRTRSGGHDSEGMSYISQVPFVIVDLRNMRSIKIDVHSQTAWVEAGATLGEVYYWVNEKNESLSLAAGYCPTVCAGGHFGGGGYGPLMRSYGLAADNIIDAHLVNVHGKVLDRKSMGEDLFWALRGGGAESFGIIAAWKIRLVAVPKSTMFSVKKIMEIHELVKLVNKWQNIAYKYDKDLLLMTHFITRNITDNQGKNKTAIHTYFSSVFLGGVDSLVDLMNKSFPELGIKKTDCRQLSWIDTIIFYSGVVNYDTDNFNKEILLDRSAGQNGAFKIKLDYVKKPIPESVFVQILEKLYEEDIGAGMYALYPYGGIMDEISESAIPFPHRAGILYELWYICSWEKQEDNEKHLNWIRNIYNFMTPYVSQNPRLAYLNYRDLDIGINDPKNPNNYTQARIWGEKYFGKNFDRLVKVKTLVDPNNFFRNEQSIPPLPRHRH

SEQ ID NO: 288 - protein, 523 aa, Artificial Sequence
  source: /note="Description of Artificial Sequence: Synthetic polypeptide"
NIQTSIANPRENFLKCFSQYIPNNATNLKLVYTQNNPLYMSVLNSTIHNLRFSSDTTPKPLVIVTPSHVSHIQGTILCSKKVGLQIRTRSGGHDSEGMSYISQVPFVIVDLRNMRSIKIDVHSQTAWVEAGATLGEVYYWVNEKNESLSLAAGYCPTVCAGGHFGGGGYGPLMRSYGLAADNIIDAHLVNVHGKVLDRKSMGEDLFWALRGGGAESFGIIVAWKIRLVAVPKSTMFQVKKIMEIHELVKLVNKWQNIAYKYDKDLLLMTHFITRNITDNQGKNKTAIHTYFSSVFLGGVDSLVDLMNKSFPELGIKKTDCRQLSWIDTIIFYSGVVNYDTDNFNKEILLDRSAGQNGAFKIKLDYVKKPIPESVFVQILEKLYEEDIGAGMYALYPYGGIMDEISESAIPFPHRAGILYELWYICSWEKQEDNEKHLNWIRNIYNFMTPYVSQNPRLAYLNYRDLDIGINDPKNPNNYTQARIWGEKYFGKNFDRLVKVKTLVDPNNFFRNEQSIPPLPRHRH

SEQ ID NO: 289 - protein, 523 aa, Artificial Sequence
  source: /note="Description of Artificial Sequence: Synthetic polypeptide"
NIQTSIANPRENFLKCFSQYIPNNATNLKLVYTQNNPLYMSVLNSTIHNLRFSSDTTPKPLVIVTPSHVSHIQGTILCSKKVGLQIRTRSGGHDSEGMSYISQVPFVIVDLRNMRSIKIDVHSQTAWVEAGATLGEVYYWVNEKNESLSLAAGYCPTVCAGGHFGGGGYGPLMRSYGLAADNIIDAHLVNVHGKVLDRKSMGEDLFWALRGGGAESFGIIVAWKIRLVAVPKSTMFSVKKIMEIHELVKLVNKWQNIAYKYDKDLLLTTHFITRNITDNQGKNKTAIHTYFSSVFLGGVDSLVDLMNKSFPELGIKKTDCRQLSWIDTIIFYSGVVNYDTDNFNKEILLDRSAGQNGAFKIKLDYVKKPIPESVFVQILEKLYEEDIGAGMYALYPYGGIMDEISESAIPFPHRAGILYELWYICSWEKQEDNEKHLNWIRNIYNFMTPYVSQNPRLAYLNYRDLDIGINDPKNPNNYTQARIWGEKYFGKNFDRLVKVKTLVDPNNFFRNEQSIPPLPRHRH

SEQ ID NO: 290 - protein, 523 aa, Artificial Sequence
  source: /note="Description of Artificial Sequence: Synthetic polypeptide"
NIQTSIANPRENFLKCFSQYIPNNATNLKLVYTQNNPLYMSVLNSTIHNLRFSSDTTPKPLVIVTPSHVSHIQGTILCSKKVGLQIRTRSGGHDSEGMSYISQVPFVIVDLRNMRSIKIDVHSQTAWVEAGATLGEVYYWVNEKNESLSLAAGYCPTVCAGGHFGGGGYGPLMRSYGLAADNIIDAHLVNVHGKVLDRKSMGEDLFWALRGGGAESFGIIVAWKIRLVAVPKSTMFSVKKIMEIHELVKLVNKWQNIAYKYDKDLLLMTHFITRNITDNQGKNKTAIHTYFNSVFLGGVDSLVDLMNKSFPELGIKKTDCRQLSWIDTIIFYSGVVNYDTDNFNKEILLDRSAGQNGAFKIKLDYVKKPIPESVFVQILEKLYEEDIGAGMYALYPYGGIMDEISESAIPFPHRAGILYELWYICSWEKQEDNEKHLNWIRNIYNFMTPYVSQNPRLAYLNYRDLDIGINDPKNPNNYTQARIWGEKYFGKNFDRLVKVKTLVDPNNFFRNEQSIPPLPRHRH

SEQ ID NO: 291 - protein, 523 aa, Artificial Sequence
  source: /note="Description of Artificial Sequence: Synthetic polypeptide"
NIQTSIANPRENFLKCFSQYIPNNATNLKLVYTQNNPLYMSVLNSTIHNLRFSSDTTPKPLVIVTPSHVSHIQGTILCSKKVGLQIRTRSGGHDSEGMSYISQVPFVIVDLRNMRSIKIDVHSQTAWVEAGATLGEVYYWVNEKNESLSLAAGYCPTVCAGGHFGGGGYGPLMRSYGLAADNIIDAHLVNVHGKVLDRKSMGEDLFWALRGGGAESFGIIVAWKIRLVAVPKSTMFSVKKIMEIHELVKLVNKWQNIAYKYDKDLLLMTHFITRNITDNQGKNKTAIHTYFSSVFLGGVDSLVDLMNKSFPELGIKKTDCRQLSWIDTIRFYSGVVNYDTDNFNKEILLDRSAGQNGAFKIKLDYVKKPIPESVFVQILEKLYEEDIGAGMYALYPYGGIMDEISESAIPFPHRAGILYELWYICSWEKQEDNEKHLNWIRNIYNFMTPYVSQNPRLAYLNYRDLDIGINDPKNPNNYTQARIWGEKYFGKNFDRLVKVKTLVDPNNFFRNEQSIPPLPRHRH

SEQ ID NO: 292 - protein, 523 aa, Artificial Sequence
  source: /note="Description of Artificial Sequence: Synthetic polypeptide"
NIQTSIANPRENFLKCFSQYIPNNATNLKLVYTQNNPLYMSVLNSTIHNLRFSSDTTPKPLVIVTPSHVSHIQGTILCSKKVGLQIRTRSGGHDSEGMSYISQVPFVIVDLRNMRSIKIDVHSQTAWVEAGATLGEVYYWVNEKNESLSLAAGYCPTVCAGGHFGGGGYGPLMRSYGLAADNIIDAHLVNVHGKVLDRKSMGEDLFWALRGGGAESFGIIVAWKIRLVAVPKSTMFSVKKIMEIHELVKLVNKWQNIAYKYDKDLLLMTHFITRNITDNQGKNKTAIHTYFSSVFLGGVDSLVDLMNKSFPELGIKKTDCRQLSWIDTIIFLSGVVNYDTDNFNKEILLDRSAGQNGAFKIKLDYVKKPIPESVFVQILEKLYEEDIGAGMYALYPYGGIMDEISESAIPFPHRAGILYELWYICSWEKQEDNEKHLNWIRNIYNFMTPYVSQNPRLAYLNYRDLDIGINDPKNPNNYTQARIWGEKYFGKNFDRLVKVKTLVDPNNFFRNEQSIPPLPRHRH

SEQ ID NO: 293 - protein, 523 aa, Artificial Sequence
  source: /note="Description of Artificial Sequence: Synthetic polypeptide"
NIQTSIANPRENFLKCFSQYIPNNATNLKLVYTQNNPLYMSVLNSTIHNLRFSSDTTPKPLVIVTPSHVSHIQGTILCSKKVGLQIRTRSGGHDSEGMSYISQVPFVIVDLRNMRSIKIDVHSQTAWVEAGATLGEVYYWVNEKNESLSLAAGYCPTVCAGGHFGGGGYGPLMRSYGLAADNIIDAHLVNVHGKVLDRKSMGEDLFWALRGGGAESFGIIVAWKIRLVAVPKSTMFSVKKIMEIHELVKLVNKWQNIAYKYDKDLLLMTHFITRNITDNQGKNKTAIHTYFSSVFLGGVDSLVDLMNKSFPELGIKKTDCRQLSWIDTIIFYSQVVNYDTDNFNKEILLDRSAGQNGAFKIKLDYVKKPIPESVFVQILEKLYEEDIGAGMYALYPYGGIMDEISESAIPFPHRAGILYELWYICSWEKQEDNEKHLNWIRNIYNFMTPYVSQNPRLAYLNYRDLDIGINDPKNPNNYTQARIWGEKYFGKNFDRLVKVKTLVDPNNFFRNEQSIPPLPRHRH

SEQ ID NO: 294 - protein, 523 aa, Artificial Sequence
  source: /note="Description of Artificial Sequence: Synthetic polypeptide"
NIQTSIANPRENFLKCFSQYIPNNATNLKLVYTQNNPLYMSVLNSTIHNLRFSSDTTPKPLVIVTPSHVSHIQGTILCSKKVGLQIRTRSGGHDSEGMSYISQVPFVIVDLRNMRSIKIDVHSQTAWVEAGATLGEVYYWVNEKNESLSLAAGYCPTVCAGGHFGGGGYGPLMRSYGLAADNIIDAHLVNVHGKVLDRKSMGEDLFWALRGGGAESFGIIVAWKIRLVAVPKSTMFSVKKIMEIHELVKLVNKWQNIAYKYDKDLLLMTHFITRNITDNQGKNKTAIHTYFSSVFLGGVDSLVDLMNKSFPELGIKKTDCRQLSWIDTIIFYSGVVNKDTDNFNKEILLDRSAGQNGAFKIKLDYVKKPIPESVFVQILEKLYEEDIGAGMYALYPYGGIMDEISESAIPFPHRAGILYELWYICSWEKQEDNEKHLNWIRNIYNFMTPYVSQNPRLAYLNYRDLDIGINDPKNPNNYTQARIWGEKYFGKNFDRLVKVKTLVDPNNFFRNEQSIPPLPRHRH

SEQ ID NO: 295 - protein, 523 aa, Artificial Sequence
  source: /note="Description of Artificial Sequence: Synthetic polypeptide"
NIQTSIANPRENFLKCFSQYIPNNATNLKLVYTQNNPLYMSVLNSTIHNLRFSSDTTPKPLVIVTPSHVSHIQGTILCSKKVGLQIRTRSGGHDSEGMSYISQVPFVIVDLRNMRSIKIDVHSQTAWVEAGATLGEVYYWVNEKNESLSLAAGYCPTVCAGGHFGGGGYGPLMRSYGLAADNIIDAHLVNVHGKVLDRKSMGEDLFWALRGGGAESFGIIVAWKIRLVAVPKSTMFSVKKIMEIHELVKLVNKWQNIAYKYDKDLLLMTHFITRNITDNQGKNKTAIHTYFSSVFLGGVDSLVDLMNKSFPELGIKKTDCRQLSWIDTIIFYSGVVNYDTDNFNKEILLDRSAGQNGAHKIKLDYVKKPIPESVFVQILEKLYEEDIGAGMYALYPYGGIMDEISESAIPFPHRAGILYELWYICSWEKQEDNEKHLNWIRNIYNFMTPYVSQNPRLAYLNYRDLDIGINDPKNPNNYTQARIWGEKYFGKNFDRLVKVKTLVDPNNFFRNEQSIPPLPRHRH

SEQ ID NO: 296 - protein, 523 aa, Artificial Sequence
  source: /note="Description of Artificial Sequence: Synthetic polypeptide"
NIQTSIANPRENFLKCFSQYIPNNATNLKLVYTQNNPLYMSVLNSTIHNLRFSSDTTPKPLVIVTPSHVSHIQGTILCSKKVGLQIRTRSGGHDSEGMSYISQVPFVIVDLRNMRSIKIDVHSQTAWVEAGATLGEVYYWVNEKNESLSLAAGYCPTVCAGGHFGGGGYGPLMRSYGLAADNIIDAHLVNVHGKVLDRKSMGEDLFWALRGGGAESFGIIVAWKIRLVAVPKSTMFSVKKIMEIHELVKLVNKWQNIAYKYDKDLLLMTHFITRNITDNQGKNKTAIHTYFSSVFLGGVDSLVDLMNKSFPELGIKKTDCRQLSWIDTIIFYSGVVNYDTDNFNKEILLDRSAGQNGAFKYKLDYVKKPIPESVFVQILEKLYEEDIGAGMYALYPYGGIMDEISESAIPFPHRAGILYELWYICSWEKQEDNEKHLNWIRNIYNFMTPYVSQNPRLAYLNYRDLDIGINDPKNPNNYTQARIWGEKYFGKNFDRLVKVKTLVDPNNFFRNEQSIPPLPRHRH

SEQ ID NO: 297 - protein, 523 aa, Artificial Sequence; identical to SEQ ID NO: 152
  source: /note="Description of Artificial Sequence: Synthetic polypeptide"

SEQ ID NO: 298 - DNA, 7939 bp, Artificial Sequence
  source: /note="Description of Artificial Sequence: Synthetic polynucleotide"
tttaaatcttgcatttaaataaattttctttttatagctttatgacttagtttcaatttatatactattttaatgacattttcgattcattgattgaaagctttgtgttttttcttgatgcgctattgcattgttcttgtctttttcgccacatgtaatatctgtagtagatacctggctgagtgaaattttagttaataatggaggcgctcttaataattttggggatattggcttttttttttaaagtttacaaatgaattttttccgccaggataacgattctgaagttactcttagcgttcctatcggtacagccatcaaatcatgcctataaatcatgcctatatttatcatctacagaatttcatcattttttttttattcttttttttgatttcggtttccttgaaatttttttgattcggtaatctccgaacagaaggaagaacgaaggaaggagcacagacttagattggtatatatacgcatatgtagtgttgaagaaacatgaaattgcccagtctgcacagaacaaaaacctgcaggaaacgaagataaatcatgtcgaaagctacatataaggaacgtgctgctactcatcctagtcctgttgctgccaagctatttaatatcatgcacgaaaagcaaacaaacttgtgtgcttcattggatgttcgtaccaccaaggaattaaagcattaggtcccaaaatttgtttactaaaaacacatgtggatatcttgactgatttttccatggagggcacagttaagccgctaaaggcattatccgccaagtacaattttttactcttcgaagacagaaaatttgctgacattggtaatacagtcaaattgcagtactctgaatagcagaatgggcagacattacgaatgcacacggtgtggtgggcccaggtattgttagcggtttgaagcaggcggcagaagaagtaacaaaggaacctagaggccttttgatgttagcagaattgtcatgcaagggctccctatctactggagaatatactaagggtcgaagagcgacaaagattttgttatcggctttattgctcaaagagacatgggtggaagagatgaaggttacgattggttgattatgacacccggtgtgggtttagatgacaagggagacgcattgggtcaacagtatagaaccgtggatgatgtggtctctacaggatctgtggaagaggactatttgcaaagggaagggatgctaaggtagagggtgaacgttacagaaaagcaggctgggaagcatatttgagaagatgcggccagcaaaactaaaaaactgtattataagtaaatgcatgtatactaaactcacaaattagagcttcaatttaattatcaatcagatctgctgcattaatgaatcggccaacgcgcggggagaggcggtttgcgtattgggcgctcttccgcttcctcgctcactgactcgctgcgctcggtcgttcggctgcggcgagcggtatcagcatcgatgaattccacggactatagactatactagtatactcatacacttccgctcaggtccttgtcctttaacgaggccttaccactcttttgttactctattgatccagctcagcaaaggcagtgtgatctaagattctatcttcgcgatgtagtaaaactagctagaccgagaaagagactagaaatgcaaaaggcacttctacaatggcttccgatgtgacgctgcagcttctcaatgatattcgaatacgctttgaggagatacagcctaatatccgacaaactgttttacagatttacgatcgtatttgttacccatcattgaattttgaacatccgaacctgggagttttccctgaaacagatagtatatttgaacctgtgtctagcgctttacggaagacaatgtatgtatttcggttcctggagaaactattgcatctattgcataggtaatcttgcacgtcgcatccccggttcattttctgcgtttccatcttgcacttcaatagcatatctttgttaacgaagcatctgtgcttcattttgtagaacaaagagcgctaatttttcaaacaaagaatctgagctgcatttttacagaacagaaatgcaacgcgaaagcgctattttaccaacgaagaatctgtgcttcatttttgtaaaacaaaaatgcaacgcgagagcgctaatttttcaaacaaagaatctgagctgcatttttacagacgcgagagcgctattttaccaacaaagaatctatacttcttttttgttctacaaaaatgcatcccgagagcgctatttttctaacaaagcatcttagattactttttttctcctttgtgcgctctataatgcagtctcttgataactttttgcactgtaggtccgttaaggttagtggtgtctattttctcttccataaaaaaagcctgactccacttcccgcgtttactgattactagcgaagctgcgggtgcattttttcaagataaaggcatccccgattatattctataccgatgtggattgcgcatactttgtgaacagaaagtgatagcgttgatgattcttattatgaacggtttcttctattttgtctctatatactacgtataggaaatgtttacattttcgtattgttttcgattcactctatgaatagttcttactacaatttttttgtctaaagagtaatactagagataaacataaaaaatgtagaggtcgagtttagatgcaagttcatggatgggtaggttatatagggatatagcacagagatatatagcaaagagatacttttgagcaatgtttgtggaagcggtattcgcaatattttagtagctcgttacagtccggtgcgtttttggttttttgaaagtgcgtcttcagagcgcttttggttttcaaaagcgctcctttctagagaataggaacttcggaataggaacttcaaagcgtttccgaaaacgagcgcttccgaaaatgcaacgcgagctgcgcacatacagctcactgttcacgtcgcacctatatctgcgtgttgcctgtatatatatatacatgagaagaacggcatagtgcgtgttttacttatatgcgtctatttatgtaggatgaaaggtagtctagtacctcctgtgatattatcccattccatgcggggtatcgtatgcttccttcagcactaccctttagctgttctatatgctgccactcctcaattggattagtctcatccttcaatgctatcatttcctttgatcatagtaccgagaaactagtgcgaagtagtgatcaggtattgctgttatctgatgagtatacgttgtcctggccacggcagaagcacgcttatcgctccaatttcccacaacattagtcaactccgttaggcccttcattgaaagaaatgaggtcatcaaatgtcttccaatccattttttatagcaaagattgaataaggcgcatttttcttcaaagctttattgtacgatctgactaagttatcttttaataattggtattcctgtttattgcttgaagaattgccggtcctatttactcgttttaggactggttcagaattcatcgatgctcactcaaaggcgctcgttttaggactggttcagaattcatcgatgctcactcaaaggcggcacagaatcaggggataacgcaggaaagaacatgtgagcaaaaggccagcaaaaggccaggaaccgtaaaaaggccgcgttgctggcgtttttccataggctccgcccccctgacgagcatcacaaaaatcgacgctcaagtcagaggtggcgaaacccgacaggactagcgtttccccctggaagctccctcgtgcgctctcctgttccgaccctgccgcttaccggatacctgtccgcctttctcccttcgggaagcgtggcgctttctcatagctcacgctgtaggtatctcagttcggtgtaggtcgttcgctccaagctgggctgtgtgcacgaaccccccgctgcgccttatccggtaactatcgtcttgagtccaacccggtaagacacgacttatcgccactggcagcagccactggtaacaggattagcagagcgaggtatgtaggcggtgctacagagttcttgaagtggtggcctaactacggctacactagaagaacagtattctgctgaagccagttaccttcggaaaaagagttggtagctcttgatccggcaaacaaaccaccgctggtagcggtggtttttttgtttgcaagcagcagattacgcgcagaaaaaaaggatctcaagaagatcctttgatcttttctacggggtctgacgctcagtggaacgagggattttggtcatgagattatcaaaaaggatcttcacctagatccttttaaattaaaaatgaagttttaaatcaatctaaagtatatatgagtaaacttggtctgacagttaccaatgcttaatcagtgaggcacctatctcagcgatctgtctatttcgttcatccatagcgtcgtgtagataactacgatacgggagggcttaccatctggccccagtgctgcaatgataccgcgagacccacgctcaccggctccagatttatcagcaataaaccagccagccggaagggccgagcgcagaagtggtcctgcaactttatccgcctccatccagtctatgaagctagagtaagtagttcgccagttaatagtttgcgcaacgttgttgccattgctacaggcatcgtggtgtcacgctcgtcgtttggtatggcttcattcagctccggttcccaacgatcaaggcgagttacatgatcccccatgttgtgcaaaaaagcggttagctccttgttgtcagaagtaagttggccgcagtgttatcactcatggttatggcagcactgcataattctcttactgtcatgccatccgtaagatgcttttctgtgactggtgagtactcaaccaagtcattctgagaatagtgtatgcggcgaccgagttgctcttgcccggcgtcaatgcgccacatagcagaactttaaaagtgctcatcattggaaaacgttcttcggggcgaaaactctcaaggatcttaccgctgttgagatccagttcgatgtaacccactcgtgcacccaactgatcttcagcatcttttactttcaccagcgtttctgggtgagcaaaaacagccgcaaaaaagggaataagggcgacacggaaatgttgaatactcatactcttcctttttcaatattattgaagcatttatcagggttattgtctcatgagcggatacatatttgaatgtatttagaaaaataaacaaataggggttccgcgcacatttccccgaaaagtgccgaaaccattattatcatgacattaacctataaaaataggcgtatcacgaggccctttcgtctcgcgcgtttcggtgatgacggtgaaaacctctgacacatgcagctcccggagacggtcacagcttgtctgtaagcggatgccgggagcagacaagcccgtcagggcgcggcgggtgtcggggctggcttaactatgcggcatcagagcagattgtactgagagtgcaccatatgcggtgtgaaataccgcacagatgcgtaaggagaaaataccgcatcaggcgccattcgccattcaggctgcgcaactgttgggaagggcgatcggtgcgggcctctagctggcgaaagggggatgtgctgcaaggcgattaagttgggtaacgccagggttttcccagtcacgacgttgtaaaacgacggccagtgaattgcggccgcatcgatggtgggatgagcttggagcaggaagaatacactatactggatctaaagagtacaatagatggcagcgcaaaaaggcttcaagcttacacaacacggtttatttcgaaataatatccttctcgaaagctttaacgaacgcagaattttcgagttattaaacttaaaatacgctgaacccgaacatagaaatatcgaatgggaaaaaaaaactgcataaaggcattaaaagaggttaataaaaatcttaataatcattaaaagataaataatagtctatatatacgtatataaataaaaaatattcaaaaaataaaataaactattattttagcgtaaaggatggggaaagagaaaagaaaaaaattgatctatcgatttcaattcaattcaatttatatagtttttaaagtatagaggtatattaacaattttttgttgatacttttatgacatttgaataagaagtaatacaaactgaaaatgttgaaagtattagttaaagtggttatgcagcttttccatttatatatctgttaatagatcaaaaatcatcgcttcgctgattaattaccccagaaaactaatcgcattatcatcctatggttgttaatttgattcgttaatttgaaggtttgtggggccaggttactgccaatttttcctcttcataaccataaaagctagtattgtagaatctttattgttcggagcagtgcggcgcgaggcacatctgcgtttcaggaacgcgaccgacgcacggaggagagtcttccgtcggagggctgtcgcccgctcggcggcttctaatccgtacttcaatatagcaatgagcagttaagcgtattactgaaagttccaaagagaaggtttttttaggctaagataatggggctctttacatttccacaacatataagtaagatttatatggtggtaatgccatgtaatatgattattaaacttctttgcgtccatccaaaaaaaaagtaagaatttttgaaaattcaatataaatgaatcatttgagagctgaaggtccagcatcagttttggctattggtactgcaaacccagaaaacatcttgatccaagatgatacttcagagttactaagtcagaacatatgacacaattgaaggaaaagtttagaaagatctgtgataagtctatgattagaaaaagaaattgtttcttgaacgaagaacatttgaagcaaaacccaagattagttgaacatgaaatgcaaacattggatgctagacaagagaagttccaaagttgggtaaagatgcatgtgctaaagcaattaaagaatggggtcaaccaaagtctaagatcactcatttgatttttacatcatcgtctactacagatatgccaggtgctgattaccattgtgcaaagttgttgggtttgtcaccatctgttaagagagttatggttgttacggtggtggtactgttttgagaatcgctaaggatatcgcagaaaacaataagggtgctagagtcttggcagtttgttgtgatatcatggcttgtttgtttagaggtccatcagattctgatttggaattgttagttggtcaagctatttttggtgacggtgctgcggtgcagaaccagatgaatcagttggtgaaagaccaatcttcgaattagtttcaactggtcaaacaattttgccaaattctgaaggtacaattggtggtcatatcagagaagctggtttgatcttcgatttgcataaagatgttccaatgttgatctctaacaacatcgaaaagcttttactccaatcggtatctcagattggaactctattttctggattacacatccaggtggtaaagcaatcttggataaggttgaagaaaaattggatttgaagaaagaaaaatttgttgattcaagacatgttttgtctgaacatggtaacatgtcttcatctactgttttgaattgagaaagagatcattagaagagggtaaatctactacaggtgacggttttgaatggggtgttttatttggttttggtccaggtttgacagttgaaagagttgttgttagatctgttccaattaaatac

SEQ ID NO: 299 - DNA, 7892 bp, Artificial Sequence
  source: /note="Description of Artificial Sequence: Synthetic polynucleotide"
tttaaatcttgcatttaaataaattttctttttatagctttatgacttagtttcaatttatatactattttaatgacattttcgattcattgattgaaagctttgtgttttttcttgatgcgctattgcattgttcttgtctttttcgccacatgtaatatctgtagtagatacctggctgagtgaaattttagttaataatggaggcgctcttaataattttggggatattggcttttttttttaaagtttacaaatgaattttttccgccaggataacgattctgaagttactcttagcgttcctatcggtacagccatcaaatcatgcctataaatcatgcctatatttatcatctacagaatttcatcattttttttttattcttttttttgatttcggtttccttgaaatttttttgattcggtaatctccgaacagaaggaagaacgaaggaaggagcacagacttagattggtatatatacgcatatgtagtgttgaagaaacatgaaattgcccagtctgcacagaacaaaaacctgcaggaaacgaagataaatcatgtcgaaagctacatataaggaacgtgctgctactcatcctagtcctgttgctgccaagctatttaatatcatgcacgaaaagcaaacaaacttgtgtgcttcattggatgttcgtaccaccaaggaattaaagcattaggtcccaaaatttgtttactaaaaacacatgtggatatcttgactgatttttccatggagggcacagttaagccgctaaaggcattatccgccaagtacaattttttactcttcgaagacagaaaatttgctgacattggtaatacagtcaaattgcagtactctgaatagcagaatgggcagacattacgaatgcacacggtgtggtgggcccaggtattgttagcggtttgaagcaggcggcagaagaagtaacaaaggaacctagaggccttttgatgttagcagaattgtcatgcaagggctccctatctactggagaatatactaagggtcgaagagcgacaaagattttgttatcggctttattgctcaaagagacatgggtggaagagatgaaggttacgattggttgattatgacacccggtgtgggtttagatgacaagggagacgcattgggtcaacagtatagaaccgtggatgatgtggtctctacaggatctgtggaagaggactatttgcaaagggaagggatgctaaggtagagggtgaacgttacagaaaagcaggctgggaagcatatttgagaagatgcggccagcaaaactaaaaaactgtattataagtaaatgcatgtatactaaactcacaaattagagcttcaatttaattatcaatcagatctgctgcattaatgaatcggccaacgcgcggggagaggcggtttgcgtattgggcgctcttccgcttcctcgctcactgactcgctgcgctcggtcgttcggctgcggcgagcggtatcagcatcgatgaattccacggactatagactatactagtatactcatacacttccgctcaggtccttgtcctttaacgaggccttaccactcttttgttactctattgatccagctcagcaaaggcagtgtgatctaagattctatcttcgcgatgtagtaaaactagctagaccgagaaagagactagaaatgcaaaaggcacttctacaatggcttccgatgtgacgctgcagcttctcaatgatattcgaatacgctttgaggagatacagcctaatatccgacaaactgttttacagatttacgatcgtatttgttacccatcattgaattttgaacatccgaacctgggagttttccctgaaacagatagtatatttgaacctgtgtctagcgctttacggaagacaatgtatgtatttcggttcctggagaaactattgcatctattgcataggtaatcttgcacgtcgcatccccggttcattttctgcgtttccatcttgcacttcaatagcatatctttgttaacgaagcatctgtgcttcattttgtagaacaaagagcgctaatttttcaaacaaagaatctgagctgcatttttacagaacagaaatgcaacgcgaaagcgctattttaccaacgaagaatctgtgcttcatttttgtaaaacaaaaatgcaacgcgagagcgctaatttttcaaacaaagaatctgagctgcatttttacagacgcgagagcgctattttaccaacaaagaatctatacttcttttttgttctacaaaaatgcatcccgagagcgctatttttctaacaaagcatcttagattactttttttctcctttgtgcgctctataatgcagtctcttgataactttttgcactgtaggtccgttaaggttagtggtgtctattttctcttccataaaaaaagcctgactccacttcccgcgtttactgattactagcgaagctgcgggtgcattttttcaagataaaggcatccccgattatattctataccgatgtggattgcgcatactttgtgaacagaaagtgatagcgttgatgattcttattatgaacggtttcttctattttgtctctatatactacgtataggaaatgtttacattttcgtattgttttcgattcactctatgaatagttcttactacaatttttttgtctaaagagtaatactagagataaacataaaaaatgtagaggtcgagtttagatgcaagttcatggatgggtaggttatatagggatatagcacagagatatatagcaaagagatacttttgagcaatgtttgtggaagcggtattcgcaatattttagtagctcgttacagtccggtgcgtttttggttttttgaaagtgcgtcttcagagcgcttttggttttcaaaagcgctcctttctagagaataggaacttcggaataggaacttcaaagcgtttccgaaaacgagcgcttccgaaaatgcaacgcgagctgcgcacatacagctcactgttcacgtcgcacctatatctgcgtgttgcctgtatatatatatacatgagaagaacggcatagtgcgtgttttacttatatgcgtctatttatgtaggatgaaaggtagtctagtacctcctgtgatattatcccattccatgcggggtatcgtatgcttccttcagcactaccctttagctgttctatatgctgccactcctcaattggattagtctcatccttcaatgctatcatttcctttgatcatagtaccgagaaactagtgcgaagtagtgatcaggtattgctgttatctgatgagtatacgttgtcctggccacggcagaagcacgcttatcgctccaatttcccacaacattagtcaactccgttaggcccttcattgaaagaaatgaggtcatcaaatgtcttccaatccattttttatagcaaagattgaataaggcgcatttttcttcaaagctttattgtacgatctgactaagttatcttttaataattggtattcctgtttattgcttgaagaattgccggtcctatttactcgttttaggactggttcagaattcatcgatgctcactcaaaggcggcacagaatcaggggataacgcaggaaagaacatgtgagcaaaaggccagcaaaaggccaggaaccgtaaaaaggccgcgttgctggcgtttttccataggctccgcccccctgacgagcatcacaaaaatcgacgctcaagtcagaggtggcgaaacccgacaggactagcgtttccccctggaagctccctcgtgcgctctcctgttccgaccctgccgcttaccggatacctgtccgcctttctcccttcgggaagcgtggcgctttctcatagctcacgctgtaggtatctcagttcggtgtaggtcgttcgctccaagctgggctgtgtgcacgaaccccccgctgcgccttatccggtaactatcgtcttgagtccaacccggtaagacacgacttatcgccactggcagcagccactggtaacaggattagcagagcgaggtatgtaggcggtgctacagagttcttgaagtggtggcctaactacggctacactagaagaacagtattctgctgaagccagttaccttcggaaaaagagttggtagctcttgatccggcaaacaaaccaccgctggtagcggtggtttttttgtttgcaagcagcagattacgcgcagaaaaaaaggatctcaagaagatcctttgatcttttctacggggtctgacgctcagtggaacgagggattttggtcatgagattatcaaaaaggatcttcacctagatccttttaaattaaaaatgaagttttaaatcaatctaaagtatatatgagtaaacttggtctgacagttaccaatgcttaatcagtgaggcacctatctcagcgatctgtctatttcgttcatccatagcgtcgtgtagataactacgatacgggagggcttaccatctggccccagtgctgcaatgataccgcgagacccacgctcaccggctccagatttatcagcaataaaccagccagccggaagggccgagcgcagaagtggtcctgcaactttatccgcctccatccagtctatgaagctagagtaagtagttcgccagttaatagtttgcgcaacgttgttgccattgctacaggcatcgtggtgtcacgctcgtcgtttggtatggcttcattcagctccggttcccaacgatcaaggcgagttacatgatcccccatgttgtgcaaaaaagcggttagctccttgttgtcagaagtaagttggccgcagtgttatcactcatggttatggcagcactgcataattctcttactgtcatgccatccgtaagatgcttttctgtgactggtgagtactcaaccaagtcattctgagaatagtgtatgcggcgaccgagttgctcttgcccggcgtcaatgcgccacatagcagaactttaaaagtgctcatcattggaaaacgttcttcggggcgaaaactctcaaggatcttaccgctgttgagatccagttcgatgtaacccactcgtgcacccaactgatcttcagcatcttttactttcaccagcgtttctgggtgagcaaaaacagccgcaaaaaagggaataagggcgacacggaaatgttgaatactcatactcttcctttttcaatattattgaagcatttatcagggttattgtctcatgagcggatacatatttgaatgtatttagaaaaataaacaaataggggttccgcgcacatttccccgaaaagtgccgaaaccattattatcatgacattaacctataaaaataggcgtatcacgaggccctttcgtctcgcgcgtttcggtgatgacggtgaaaacctctgacacatgcagctcccggagacggtcacagcttgtctgtaagcggatgccgggagcagacaagcccgtcagggcgcggcgggtgtcggggctggcttaactatgcggcatcagagcagattgtactgagagtgcaccatatgcggtgtgaaataccgcacagatgcgtaaggagaaaataccgcatcaggcgccattcgccattcaggctgcgcaactgttgggaagggcgatcggtgcgggcctctagctggcgaaagggggatgtgctgcaaggcgattaagttgggtaacgccagggttttcccagtcacgacgttgtaaaacgacggccagtgaattgcggccgcatcgatggtgggatgagcttggagcaggaagaatacactatactggatctaaagagtacaatagatggcagcgcaaaaaggcttcaagcttacacaacacggtttatttcgaaataatatccttctcgaaagctttaacgaacgcagaattttcgagttattaaacttaaaatacgctgaacccgaacatagaaatatcgaatgggaaaaaaaaactgcataaaggcattaaaagaggttaataaaaatcttaataatcattaaaagataaataatagtctatatatacgtatataaataaaaaatattcaaaaaataaaataaactattattttagcgtaaaggatggggaaagagaaaagaaaaaaattgatctatcgatttcaattcaattcaatttatatagtttttaaagtatagaggtatattaacaattttttgttgatacttttatgacatttgaataagaagtaatacaaactgaaaatgttgaaagtattagttaaagtggttatgcagcttttccatttatatatctgttaatagatcaaaaatcatcgcttcgctgattaattaccccagaaaactaatcgcattatcatcctatggttgttaatttgattcgttaatttgaaggtttgtggggccaggttactgccaatttttcctcttcataaccataaaagctagtattgtagaatctttattgttcggagcagtgcggcgcgaggcacatctgcgtttcaggaacgcgaccgacgcacggaggagagtcttccgtcggagggctgtcgcccgctcggcggcttctaatccgtacttcaatatagcaatgagcagttaagcgtattactgaaagttccaaagagaaggtttttttaggctaagataatggggctctttacatttccacaacatataagtaagatttatatggtggtaatgccatgtaatatgattattaaacttctttgcgtccatccaaaaaaaaagtaagaatttttgaaaattcaatataaatgaatcatttgagagctgaaggtccagcatcagttttggctattggtactgcaaacccagaaaacatcttgatccaagatgatacttcagagttactaagtcagaacatatgacacaattgaaggaaaagtttagaaagatctgtgataagtctatgattagaaaaagaaattgtttcttgaacgaagaacatttgaagcaaaacccaagattagttgaacatgaaatgcaaacattggatgctagacaagagaagttccaaagttgggtaaagatgcatgtgctaaagcaattaaagaatggggtcaaccaaagtctaagatcactcatttgatttttacatcagcatctactacagatatgccaggtgctgattaccattgtgcaaagttgttgggtttgtcaccatctgttaagagagttatggttgttacggtggtggtactgttttgagaatcgctaaggatatcgcagaaaacaataagggtgctagagtcttggcagtttgttgtgatatcatggcttgtttgtttagaggtccatcagattctgatttggaattgttagttggtcaagctatttttggtgacggtgctgcggtgcagaaccagatgaatcagttggtgaaagaccaatcttcgaattagtttcaactggtcaaacaattttgccaaattctgaaggtacaattggtggtcatatcagagaagctggtttgatcttcgatttgcataaagatgttccaatgttgatctctaacaacatcgaaaagcttttactccaatcggtatctcagattggaactctattttctggattacacatccaggtggtaaagcaatcttggataaggttgaagaaaaattggatttgaagaaagaaaaatttgttgattcaagacatgttttgtctgaacatggtaacatgtcttcatctactgttttgaattgagaaagagatcattagaagagggtaaatctactacaggtgacggttttgaatggggtgttttatttggttttggtccaggtttgacagttgaaagagttgttgttagatctgttccaattaaatac

SEQ ID NO: 300 - DNA, 2649 bp, Artificial Sequence
  source: /note="Description of Artificial Sequence: Synthetic polynucleotide"
atgatattacttcattttgtctattctctttgggccttacttctcattcctttaattaatgcggttccaaagaagggaacgaatgataaagaaatagtggttacagaaaacaaatttgatttcaagattcaattctatcaatactttgacacagtcaccgacgaatccctcctcatgatcaattcaagaggagaagcttatatatctcatgatggtggacaaacaataaaaaggttcgacagtaatggtgaaacaattattgaagttgtgtttaatccatactacaattcttcagcttatctgtttggttccaaaggtagcattttctctacccatgataggggatactcttttatgactgctaaattgcccgaggctaggcagttaggtatgccattagactttaacgctaaggcacaggatacatttatctattatggtggtaagaattgtgagtcaatcttaagtccggaatgtcatgcggtagcatacctgaccaatgatgggggcgaaacgtttacggaaatgcttgataatgcaattcattgtgagtttgcgggctcacttttcaaatatccgtcaaatgaggatatggttatgtgtcaagtgaaggaaaagtcttcgcagacaagaagcttagtttcttctactgattttttccaggatgataaaaataccgtctttgaaaatattatcggctacttatccactggtggctatatcatcgttgctgttcctcatgagaacaacgaattgagagcatacgtaactatcgatggtactgagtttgccgaggcaaaattcccatatgatgaagatgttgggaagcaagaggcattcactatattagagtctgagaaaggatcgatattcttacatttagcaacaaacttagtaccaggacgcgattttggcaatcttttgaaatccaactcaaatggtacttcttttgtcacgttggagcatgccgttaatagaaacacattcggctatgttgactttgaaaaaattcaaggtctcgaaggcattattctcaccaacatcgtttcaaatagtgacaaggtcgccgagaataaagaagacaaacaattgaagacgaagatcacctttaatgaaggttcagattggaactttttgaaacctccgaagagggattcagaaggaaaaaagttttcttgcagctccaaatcactggatgagtgttcattgcacttacatggctatactgaacgtaaggatattagagatacatattcttccggttctgcattaggaatgatgttcggcgttggcaacgttggtcctaaccttttaccatataaagaatgttccaccttcttcaccaccgatggtggcgaaacgtgggctgaagttaagaagactcctcaccaatgggaatacggtgaccacggtgggattttagttttagttcctgaaaactcagaaactgattctatttcctattctaccgattttggtaaaacatggaaagattataaattctgcgctgataaggttttagtaaaggatataaccactgttcccagggattctgctttgagatttttgctgtttggagaggcagcagatattggaggcagctcatttagaacgtacacaattgattttagaaacatcttcgaaagacaatgtgatttcgacatcactggtaaggaaagcgcagattataaatactctcctctgggttccaaaagcaattgcctatttggtcaccaaaccgagtttttacgtaaaaccgatgaaaattgttttattgggaatattccactttctgaattttcaagaaatatcaaaaactgttcttgtacaagacaagatttcgagtgtgattacaacttttacaaagctaacgatggtacttgtaaattagtcaaaggactaagcccagcaaatgctgcagacgtttgtaaaaaagagccagatttaatcgaatattttgaatcgtcaggctacagaaagatccctctatcaacctgtgagggtggcctgaaattggatgctccctcatcaccacatgcttgcccaggaaaagaaaaagaattcaaggaaaagtactcagtaagtgccggtccctttgcatttattttcatttcaattcttttaataattttctttgccgcatggtttgtatatgacagaggtatcagaagaaatgggggatttgcaaggtttggagaaattaggctaggtgacgatggtttaatagaaaacaataatactgacagagttgtcaataacattgtgaaatcaggattttacgttttctcaaatatcgggtctcttttacagcacacaaaaactaatatagcgcatgctatctccaaaattagaggaaggtttggaaacagaacaggtccaagctactcatccctgatccatgatcaatttttggatgaagcagatgacctgcttgctggccacgatgaagacgccaatgacttatccagtttcatggatcagggtagtaattttgaaatcgaagaagatgatgttccaacacttgaagaagagcatacatcatatacagatcaacctacgaccaccgatgttccagatacattaccagaaggaaatgaggaaaacatcgacaggcctgattctacagcgccatctaacgaaaaccagtag

SEQ ID NO: 301 - DNA, 2295 bp, Artificial Sequence
  source: /note="Description of Artificial Sequence: Synthetic polynucleotide"
atgcaatataaaaagccattagtcgtctccgctttagctgctacatctttagctgcctatgctccaaaggacccgtggtccactttaactccatcagctacttacaagggtggtataacagattactcttcgagtttcggtattgctattgaagccgtggctaccagtgcttcctccgtcgcctcatctaaagcaaagagagccgcctctcagataggtgatggtcaagtacaggctgccactactactgctgctgtttctaagaaatccaccgctgctgctgtttctcaaataactgacggtcaagttcaagctgctaagtctactgccgctgctgtttcccaaataactgacggtcaagttcaagctgctaagtctactgccgctgccgtttctcaaataactgacggtcaagttcaagctgctaagtctactgccgctgccgtttctcaaataactgatggtcaagttcaagctgccaagtctactgctgccgctgcctctcagatttctgacggccaagttcaggccactacctctactaaggctgctgcatcccaaattacagatgggcagatacaagcatctaaaactaccagtggcgctagtcaagtaagtgatggccaagtccaggctactgctgaagtgaaagacgctaacgatccagtcgatgttgtttcctgtaataacaatagtaccttggagaaaagagaggctgaagcaaatattcaaacttcaatcgctaacccaagagaaaatttcttgaagtgtttctctcaatacattccaaataatgcaacaaatttgaaattggtttatactcaaaataatccattatacatgtctgttttaaattctacaattcataatttgagattttcttcagatactacaccaaaaccattggttattgttacaccatctcatgtttcacatatccaaggtactatcttgtgttctaagaaagttggtttgcaaattagaactagatcaggtggtcatgattcagaaggcatgtcttacatctcacaagttccattcgttatcgttgatttgagaaacatgagatcaattaaaattgatgttcattcacaaacagcttgggttgaagctggtgcaactttgggtgaagtttactactgggttaacgaaaagaatgaatctttatcattggctgctggttactgtccaacagtttgtgctggtggtcattttggtggtggtggttatggtccattaatgagatcctatggtttggctgctgataacatcatcgatgcacatttggttaacgttcatggtaaagttttggatagaaagtctatgggtgaagatttgttttgggctttgagaggtggtggtgctgaatcatttggtatcatcgttgcttggaagatcagattggttgcagttccaaaatctactatgttctcagttaagaaaattatggaaatccatgaattagttaaattggttaataagtggcaaaatattgcttataaatacgataaagatttgttattgatgactcattttattacaagaaatattactgataaccaaggtaaaaataagacagctatccatacttacttttcttcagttttcttgggtggtgttgattctttggttgatttgatgaataagtcttttccagaattaggtattaagaaaactgattgtagacaattgtcttggatcgatactatcattttctattcaggtgttgttaactacgatacagataacttcaataaggaaattttattggatagatcagctggtcaaaatggtgcttttaaaattaaattggattacgttaagaaaccaattccagaatcagttttcgttcaaattttagaaaaattgtatgaagaagatattggtgctggcatgtacgcattgtatccatacggtggtatcatggatgaaatttctgaatcagctattccatttccacatagagcaggtattttatacgaattgtggtacatttgttcttgggaaaagcaagaagataacgaaaaacatttgaactggattagaaacatctataacttcatgactccatacgtttcacaaaacccaagattggcttatttgaactacagagatttggatatcggtattaatgatcctaaaaatccaaacaactatacacaagcaagaatttggggtgaaaagtacttcggtaaaaatttcgatagattggttaaggttaaaactttggttgatccaaataatttctttagaaatgaacaatctattccaccattgccaagacatagacattga

SEQ ID NO: 302 - protein, 764 aa, Artificial Sequence
  source: /note="Description of Artificial Sequence: Synthetic polypeptide"
MQYKKPLVVSALAATSLAAYAPKDPWSTLTPSATYKGGITDYSSSFGIAIEAVATSASSVASSKAKRAASQIGDGQVQAATTTAAVSKKSTAAAVSQITDGQVQAAKSTAAAVSQITDGQVQAAKSTAAAVSQITDGQVQAAKSTAAAVSQITDGQVQAAKSTAAAASQISDGQVQATTSTKAAASQITDGQIQASKTTSGASQVSDGQVQATAEVKDANDPVDVVSCNNNSTLEKREAEANIQTSIANPRENFLKCFSQYIPNNATNLKLVYTQNNPLYMSVLNSTIHNLRFSSDTTPKPLVIVTPSHVSHIQGTILCSKKVGLQIRTRSGGHDSEGMSYISQVPFVIVDLRNMRSIKIDVHSQTAWVEAGATLGEVYYWVNEKNESLSLAAGYCPTVCAGGHFGGGGYGPLMRSYGLAADNIIDAHLVNVHGKVLDRKSMGEDLFWALRGGGAESFGIIVAWKIRLVAVPKSTMFSVKKIMEIHELVKLVNKWQNIAYKYDKDLLLMTHFITRNITDNQGKNKTAIHTYFSSVFLGGVDSLVDLMNKSFPELGIKKTDCRQLSWIDTIIFYSGVVNYDTDNFNKEILLDRSAGQNGAFKIKLDYVKKPIPESVFVQILEKLYEEDIGAGMYALYPYGGIMDEISESAIPFPHRAGILYELWYICSWEKQEDNEKHLNWIRNIYNFMTPYVSQNPRLAYLNYRDLDIGINDPKNPNNYTQARIWGEKYFGKNFDRLVKVKTLVDPNNFFRNEQSIPPLPRHRH

SEQ ID NO: 303 - protein, 568 aa, Artificial Sequence
  source: /note="Description of Artificial Sequence: Synthetic polypeptide"
MKLKTVRSAVLSSLFASQVLGQTTAQTNSGGLDVVGLISMAKRKREEGEPKNPQENFLKCFSEYIPNNPANPKFIYTQHDQLYMSVLNSTIQNLRFTSDTTPKPLVIVTPSNVSHIQASILCSKKVGLQIRTRSGGHDAEGMSYISQVPFVVVDLRNMHSIKIDVHSQTAWVEAGATLGEVYYWINEKNENFSFPGGYCPTVGVGGHFSGGGYGALMRNYGLAADNIIDAHLVNVDGKVLDRKSMGEDLFWAIRGGGGENFGIIAAWKIKLVAVPSKSTIFSVKKNMEIHGLVKLFNKWQNIAYKYDKDLVLMTHFITKNITDNHGKNKTTVHGYFSSIFHGGVDSLVDLMNKSFPELGIKKTDCKEFSWIDTTIFYSGVVNFNTANFKKEILLDRSAGKKTAFSIKLDYVKKPIPETAMVKILEKLYEEDVGVGMYVLYPYGGIMEEISESAIPFPHRAGIMYELWYTASWEKQEDNEKHINWVRSVYNFTTPYVSQNPRLAYLNYRDLDLGKTNPESPNNYTQARIWGEKYFGKNFNRLVKVKTKADPNNFFRNEQSIPPLPPHHH

SEQ ID NO: 304 - protein, 524 aa, Unknown
  source: /note="Description of Unknown: CBCA core sequence"
NIQTSIANPRENFLKCFSQYIPNNATNLKLVYTQNNPLYMSVLNSTIHNLRFSSDTTPKPLVIVTPSHVSHIQATILCSKKVGLQIRTRSGGHDSEGMSYISQVPFVIVDLRNMRSIKIDVHSQTAWVEAGATLGEVYYWVNEKNESLSLAAGYCPTVCAGGHFGGGGYGPLMRSYGLAADNIIDAHLVNVHGKVLDRKSMGEDLFWALRGGGAESFGIIVAWKIRLVAVPSKSTMFSVKKIMEIHELVKLVNKWQNIAYKYDKDLLLTTHFITRNITDNQGKNKTAIHTYFSSVFLGGVDSLVDLMNKSFPELGIKKTDCRQLSWIDTIIFYSGVVNYDTDNFNKEILLDRSAGQNGAFKIKLDYVKKPIPESVFVQILEKLYEEDIGAGMYALYPYGGIMDEISESAIPFPHRAGILYELWYICSWEKQEDNEKHLNWIRNIYNFMTPYVSQNPRLAYLNYRDLDIGINDPKNPNNYTQARIWGEKYFGKNFDRLVKVKTLVDPNNFFRNEQSIPPLPRHRH

SEQ ID NO: 305 - protein, 524 aa, Unknown; identical to SEQ ID NO: 304
  source: /note="Description of Unknown: CBCA core sequence"

SEQ ID NO: 306 - protein, 524 aa, Artificial Sequence
  source: /note="Description of Artificial Sequence: Synthetic polypeptide"
NIQTSIANPRENFLKCFSQYIPNNATNLKLVYTQNNPLYMSVLNSTIHNLRFSSDTTPKPLVIVTPSHVSHIQATILCSKKVGLQIRTRSGGHSSEGMSYISQVPFVIVDLRNMRSIKIDVHSQTAWVEAGATLGEVYYWVNEKNESLSLAAGYCPTVCAGGHFGGGGYGPLMRSYGLAADNIIDAHLVNVHGKVLDRKSMGEDLFWALRGGGAESFGIIVAWKIRLVAVPSKSTMFSVKKIMEIHELVKLVNKWQNIAYKYDKDLLLTTHFITRNITDNQGKNKTAIHTYFSSVFLGGVDSLVDLMNKSFPELGIKKTDCRQLSWIDTIIFYSGVVNYDTDNFNKEILLDRSAGQNGAFKIKLDYVKKPIPESVFVQILEKLYEEDIGAGMYALYPYGGIMDEISESAIPFPHRAGILYELWYICSWEKQEDNEKHLNWIRNIYNFMTPYVSQNPRLAYLNYRDLDIGINDPKNPNNYTQARIWGEKYFGKNFDRLVKVKTLVDPNNFFRNEQSIPPLPRHRH

SEQ ID NO: 307 - protein, 524 aa, Artificial Sequence
  source: /note="Description of Artificial Sequence: Synthetic polypeptide"
NIQTSIANPRENFLKCFSQYIPNNATNLKLVYTQNNPLYMSVLNSTIHNLRFSSDTTPKPLVIVTPSHVSHIQATILCSKKVGLQIRTRSGGHNSEGMSYISQVPFVIVDLRNMRSIKIDVHSQTAWVEAGATLGEVYYWVNEKNESLSLAAGYCPTVCAGGHFGGGGYGPLMRSYGLAADNIIDAHLVNVHGKVLDRKSMGEDLFWALRGGGAESFGIIVAWKIRLVAVPSKSTMFSVKKIMEIHELVKLVNKWQNIAYKYDKDLLLTTHFITRNITDNQGKNKTAIHTYFSSVFLGGVDSLVDLMNKSFPELGIKKTDCRQLSWIDTIIFYSGVVNYDTDNFNKEILLDRSAGQNGAFKIKLDYVKKPIPESVFVQILEKLYEEDIGAGMYALYPYGGIMDEISESAIPFPHRAGILYELWYICSWEKQEDNEKHLNWIRNIYNFMTPYVSQNPRLAYLNYRDLDIGINDPKNPNNYTQARIWGEKYFGKNFDRLVKVKTLVDPNNFFRNEQSIPPLPRHRH

SEQ ID NO: 308 - protein, 524 aa, Artificial Sequence
  source: /note="Description of Artificial Sequence: Synthetic polypeptide"
NIQTSIANPRENFLKCFSQYIPNNATNLKLVYTQNNPLYMSVLNSTIHNLRFSSDTTPKPLVIVTPSHVSHIQATILCSKKVGLQIRTRSGGHDSEGMSYISQVPFVIVDLRNMRSIKIDVHSQTAWVEAGATLGEVYYWVNEKNESLSLAAGYCPTVCAGGHFGGGGYGPLMRSYGLAADNIIDAHLVNVHGKVLDRKSMGEDLFWALRGGGAESFGIIVAWKIRLVAVPSKSTMFSVKKIMEIHELVKLVNKWQNIAYKYDKDLTLTTHFITRNITDNQGKNKTAIHTYFSSVFLGGVDSLVDLMNKSFPELGIKKTDCRQLSWIDTIIFYSGVVNYDTDNFNKEILLDRSAGQNGAFKIKLDYVKKPIPESVFVQILEKLYEEDIGAGMYALYPYGGIMDEISESAIPFPHRAGILYELWYICSWEKQEDNEKHLNWIRNIYNFMTPYVSQNPRLAYLNYRDLDIGINDPKNPNNYTQARIWGEKYFGKNFDRLVKVKTLVDPNNFFRNEQSIPPLPRHRH

SEQ ID NO: 309 - protein, 524 aa, Artificial Sequence
  source: /note="Description of Artificial Sequence: Synthetic polypeptide"
NIQTSIANPRENFLKCFSQYIPNNATNLKLVYTQNNPLYMSVLNSTIHNLRFSSDTTPKPLVIVTPSHVSHIQATILCSKKVGLQIRTRSGGHDSEGMSYISQVPFVIVDLRNMRSIKIDVHSQTAWVEAGATLGEVYYWVNEKNESLSLAAGYCPTVCAGGHFGGGGYGPLMRSYGLAADNIIDAHLVNVHGKVLDRKSMGEDLFWALRGGGAESFGIIVAWKIRLVAVPSKSTMFSVKKIMEIHELVKLVNKWQNIAYKYDKDLLLTTHFITRNITDNQGKNKTAIHTYFSSVFLGGVDSLVDLMNKSFPELGIKKTDCRQLSWIDTIIFYSGVVNYDTDNFNKEILLDRSAGQNGAFKIKLDYVKKPIPESVFVQILEKLYEEDIGAGMYALYPYGGIMDEISESAIPFPHRAGILYELWYICSWEKQEDNEKHLNWIRNIYNFMTPYVSQNPRLAYRNYRDLDIGINDPKNPNNYTQARIWGEKYFGKNFDRLVKVKTLVDPNNFFRNEQSIPPLPRHRH

SEQ ID NO: 310 - protein, 524 aa, Artificial Sequence
  source: /note="Description of Artificial Sequence: Synthetic polypeptide"
NIQTSIANPRENFLKCFSQYIPNNATNLKLVYTQNNPLYMSVLNSTIHNLRFSSDTTPKPLVIVTPSHVSHIQATILCSKKVGLQIRTRSGGHDSEGMSYISQVPFVIVDLRNMRSIKIDVHSQTAWVEAGATLGEVYYWVNEKNESLSLAAGYCPTVCAGGHFGGGGYGPLMRSYGLAADNIIDAHLVNVHGKVLDRKSMGEDLFWALRGGGAESFGIIVAWKIRLVAVPSKSTMFSVKKIMEIHELVKLVNKWQNIAYKYDKDLLLTTHFITRNITDNQGKNKTAIHTYFSSVFLGGVDSLVDLMNKSFPELGIKKTDCRQLSWIDTIIFYSGVVNYDTDNFNKEILLDRSAGQNGAFKIKLDYVKKPIPESVFVQILEKLYEEDIGAGMYALYPYGGIMDEISESAIPFPHRAGILYELWYICSWEKQEDNEKHLNWIRNIYNFMTPYVSQNPRLAYKNYRDLDIGINDPKNPNNYTQARIWGEKYFGKNFDRLVKVKTLVDPNNFFRNEQSIPPLPRHRH

SEQ ID NO: 311 - protein, 524 aa, Artificial Sequence
  source: /note="Description of Artificial Sequence: Synthetic polypeptide"
LIQTSIANPRENFLKCFSQYIPNNATNLKLVYTQNNPLYMSVLNSTIHNLRFSSDTTPKPLVIVTPSHVSHIQATILCSKKVGLQIRTRSGGHDSEGMSYISQVPFVIVDLRNMRSIKIDVHSQTAWVEAGATLGEVYYWVNEKNESLSLAAGYCPTVCAGGHFGGGGYGPLMRSYGLAADNIIDAHLVNVHGKVLDRKSMGEDLFWALRGGGAESFGIIVAWKIRLVAVPSKSTMFSVKKIMEIHELVKLVNKWQNIAYKYDKDLLLTTHFITRNITDNQGKNKTAIHTYFSSVFLGGVDSLVDLMNKSFPELGIKKTDCRQLSWIDTIIFYSGVVNYDTDNFNKEILLDRSAGQNGAFKIKLDYVKKPIPESVFVQILEKLYEEDIGAGMYALYPYGGIMDEISESAIPFPHRAGILYELWYICSWEKQEDNEKHLNWIRNIYNFMTPYVSQNPRLAYLNYRDLDIGINDPKNPNNYTQARIWGEKYFGKNFDRLVKVKTLVDPNNFFRNEQSIPPLPRHRH

SEQ ID NO: 312 - protein, 524 aa, Artificial Sequence
  source: /note="Description of Artificial Sequence: Synthetic polypeptide"
GIQTSIANPRENFLKCFSQYIPNNATNLKLVYTQNNPLYMSVLNSTIHNLRFSSDTTPKPLVIVTPSHVSHIQATILCSKKVGLQIRTRSGGHDSEGMSYISQVPFVIVDLRNMRSIKIDVHSQTAWVEAGATLGEVYYWVNEKNESLSLAAGYCPTVCAGGHFGGGGYGPLMRSYGLAADNIIDAHLVNVHGKVLDRKSMGEDLFWALRGGGAESFGIIVAWKIRLVAVPSKSTMFSVKKIMEIHELVKLVNKWQNIAYKYDKDLLLTTHFITRNITDNQGKNKTAIHTYFSSVFLGGVDSLVDLMNKSFPELGIKKTDCRQLSWIDTIIFYSGVVNYDTDNFNKEILLDRSAGQNGAFKIKLDYVKKPIPESVFVQILEKLYEEDIGAGMYALYPYGGIMDEISESAIPFPHRAGILYELWYICSWEKQEDNEKHLNWIRNIYNFMTPYVSQNPRLAYLNYRDLDIGINDPKNPNNYTQARIWGEKYFGKNFDRLVKVKTLVDPNNFFRNEQSIPPLPRHRH

SEQ ID NO: 313 - protein, 524 aa, Artificial Sequence
  source: /note="Description of Artificial Sequence: Synthetic polypeptide"
NIQTSIANPRENFLKCFSQYIPNNATNLKLVYTQNNPLYMSVLNSTIHNLRFSRDTTPKPLVIVTPSHVSHIQATILCSKKVGLQIRTRSGGHDSEGMSYISQVPFVIVDLRNMRSIKIDVHSQTAWVEAGATLGEVYYWVNEKNESLSLAAGYCPTVCAGGHFGGGGYGPLMRSYGLAADNIIDAHLVNVHGKVLDRKSMGEDLFWALRGGGAESFGIIVAWKIRLVAVPSKSTMFSVKKIMEIHELVKLVNKWQNIAYKYDKDLLLTTHFITRNITDNQGKNKTAIHTYFSSVFLGGVDSLVDLMNKSFPELGIKKTDCRQLSWIDTIIFYSGVVNYDTDNFNKEILLDRSAGQNGAFKIKLDYVKKPIPESVFVQILEKLYEEDIGAGMYALYPYGGIMDEISESAIPFPHRAGILYELWYICSWEKQEDNEKHLNWIRNIYNFMTPYVSQNPRLAYLNYRDLDIGINDPKNPNNYTQARIWGEKYFGKNFDRLVKVKTLVDPNNFFRNEQSIPPLPRHRH

SEQ ID NO: 314 - protein, 524 aa, Artificial Sequence
  source: /note="Description of Artificial Sequence: Synthetic polypeptide"
NIQTSIANPRENFLKCFSQYIPNNATNLKLVYTQNNPLYMSVLNSTIHNLRFSTDTTPKPLVIVTPSHVSHIQATILCSKKVGLQIRTRSGGHDSEGMSYISQVPFVIVDLRNMRSIKIDVHSQTAWVEAGATLGEVYYWVNEKNESLSLAAGYCPTVCAGGHFGGGGYGPLMRSYGLAADNIIDAHLVNVHGKVLDRKSMGEDLFWALRGGGAESFGIIVAWKIRLVAVPSKSTMFSVKKIMEIHELVKLVNKWQNIAYKYDKDLLLTTHFITRNITDNQGKNKTAIHTYFSSVFLGGVDSLVDLMNKSFPELGIKKTDCRQLSWIDTIIFYSGVVNYDTDNFNKEILLDRSAGQNGAFKIKLDYVKKPIPESVFVQILEKLYEEDIGAGMYALYPYGGIMDEISESAIPFPHRAGILYELWYICSWEKQEDNEKHLNWIRNIYNFMTPYVSQNPRLAYLNYRDLDIGINDPKNPNNYTQARIWGEKYFGKNFDRLVKVKTLVDPNNFFRNEQSIPPLPRHRH

SEQ ID NO: 315 - protein, 524 aa, Artificial Sequence
  source: /note="Description of Artificial Sequence: Synthetic polypeptide"
NIQTSIANPRENFLKCFSQYIPNNATNLKLVYTQNNPLYMSVLNSTIHNLRFSSDTTPKPLVIVTPSHVSHIQATILCSKKVGLQIRTRSGGHDGEGMSYISQVPFVIVDLRNMRSIKIDVHSQTAWVEAGATLGEVYYWVNEKNESLSLAAGYCPTVCAGGHFGGGGYGPLMRSYGLAADNIIDAHLVNVHGKVLDRKSMGEDLFWALRGGGAESFGIIVAWKIRLVAVPSKSTMFSVKKIMEIHELVKLVNKWQNIAYKYDKDLLLTTHFITRNITDNQGKNKTAIHTYFSSVFLGGVDSLVDLMNKSFPELGIKKTDCRQLSWIDTIIFYSGVVNYDTDNFNKEILLDRSAGQNGAFKIKLDYVKKPIPESVFVQILEKLYEEDIGAGMYALYPYGGIMDEISESAIPFPHRAGILYELWYICSWEKQEDNEKHLNWIRNIYNFMTPYVSQNPRLAYLNYRDLDIGINDPKNPNNYTQARIWGEKYFGKNFDRLVKVKTLVDPNNFFRNEQSIPPLPRHRH

SEQ ID NO: 316 - protein, 524 aa, Artificial Sequence
  source: /note="Description of Artificial Sequence: Synthetic polypeptide"
NIQTSIANPRENFLKCFSQYIPNNATNLKLVYTQNNPLYMSVLNSTIHNLRFSSDTTPKPLVIVTPSHVSHIQATILCSKKVGLQIRTRSGGHDAEGMSYISQVPFVIVDLRNMRSIKIDVHSQTAWVEAGATLGEVYYWVNEKNESLSLAAGYCPTVCAGGHFGGGGYGPLMRSYGLAADNIIDAHLVNVHGKVLDRKSMGEDLFWALRGGGAESFGIIVAWKIRLVAVPSKSTMFSVKKIMEIHELVKLVNKWQNIAYKYDKDLLLTTHFITRNITDNQGKNKTAIHTYFSSVFLGGVDSLVDLMNKSFPELGIKKTDCRQLSWIDTIIFYSGVVNYDTDNFNKEILLDRSAGQNGAFKIKLDYVKKPIPESVFVQILEKLYEEDIGAGMYALYPYGGIMDEISESAIPFPHRAGILYELWYICSWEKQEDNEKHLNWIRNIYNFMTPYVSQNPRLAYLNYRDLDIGINDPKNPNNYTQARIWGEKYFGKNFDRLVKVKTLVDPNNFFRNEQSIPPLPRHRH

SEQ ID NO: 317 - protein, 524 aa, Artificial Sequence
  source: /note="Description of Artificial Sequence: Synthetic polypeptide"
NIQTSIANPRENFLKCFSQYIPNNATNLKLVYTQNNPLYMSVLNSTIHNLRFSSDTTPKPLVIVTPSHVSHIQATILCSKKAGLQIRTRSGGHDSEGMSYISQVPFVIVDLRNMRSIKIDVHSQTAWVEAGATLGEVYYWVNEKNESLSLAAGYCPTVCAGGHFGGGGYGPLMRSYGLAADNIIDAHLVNVHGKVLDRKSMGEDLFWALRGGGAESFGIIVAWKIRLVAVPSKSTMFSVKKIMEIHELVKLVNKWQNIAYKYDKDLLLTTHFITRNITDNQGKNKTAIHTYFSSVFLGGVDSLVDLMNKSFPELGIKKTDCRQLSWIDTIIFYSGVVNYDTDNFNKEILLDRSAGQNGAFKIKLDYVKKPIPESVFVQILEKLYEEDIGAGMYALYPYGGIMDEISESAIPFPHRAGILYELWYICSWEKQEDNEKHLNWIRNIYNFMTPYVSQNPRLAYLNYRDLDIGINDPKNPNNYTQARIWGEKYFGKNFDRLVKVKTLVDPNNFFRNEQSIPPLPRHRH

SEQ ID NO: 318 - protein, 524 aa, Artificial Sequence
  source: /note="Description of Artificial Sequence: Synthetic polypeptide"
NIQTSIANPRENFLKCFSQYIPNNATNLKLVYTQNNPLYMSVLNSTIHNLRFSSDTTPKPLVIVTPSHVSHIQATILCSKKTGLQIRTRSGGHDSEGMSYISQVPFVIVDLRNMRSIKIDVHSQTAWVEAGATLGEVYYWVNEKNESLSLAAGYCPTVCAGGHFGGGGYGPLMRSYGLAADNIIDAHLVNVHGKVLDRKSMGEDLFWALRGGGAESFGIIVAWKIRLVAVPSKSTMFSVKKIMEIHELVKLVNKWQNIAYKYDKDLLLTTHFITRNITDNQGKNKTAIHTYFSSVFLGGVDSLVDLMNKSFPELGIKKTDCRQLSWIDTIIFYSGVVNYDTDNFNKEILLDRSAGQNGAFKIKLDYVKKPIPESVFVQILEKLYEEDIGAGMYALYPYGGIMDEISESAIPFPHRAGILYELWYICSWEKQEDNEKHLNWIRNIYNFMTPYVSQNPRLAYLNYRDLDIGINDPKNPNNYTQARIWGEKYFGKNFDRLVKVKTLVDPNNFFRNEQSIPPLPRHRH

SEQ ID NO: 319 - protein, 539 aa, Artificial Sequence
  source: /note="Description of Artificial Sequence: Synthetic polypeptide"
MSKGEELFTGVVPILVELDGDVNGHKFSVSGEGEGDATYGKLTLKLICTTGKLPVPWPTLVTTLGYGLQCFARYPDHMKQHDFFKSAMPEGYVQERTIFFKDDGNYKTRAEVKFEGDTLVNRIELKGIDFKEDGNILGHKLEYNYNSHNVYITADKQKNGIKANFKIRHNIEDGGVQLADHYQQNTPIGDGPVLLPDNHYLSYQSALSKDPNEKRDHMVLLEFVTAAGITHGMDELYKKILNFGHTCWKLQRPYVVKGMISIACGLFGRELFNNRHLFSWGLMWKAFFALVPILSFNFFAAIMNQIYDVDIDRINKPDLPLVSGEMSIETAWILSIIVALTGLIVTIKLKSAPLFVFIYIFGIFAGFAYSVPPIRWKQYPFTNFLITISSHVGLAFTSYSATTSALGLPFVWRPAFSFIIAFMTVMGMTIAFAKDISDIEGDAKYGVSTVATKLGARNMTFVVSGVLLLNYLVSISIGIIWPQVFKSNIMILSHAILAFCLIFQTRELALANYASAPSRQFFEFIWLLYYAEYFVYVFI

SEQ ID NO: 320 - protein, 539 aa, Artificial Sequence; identical to SEQ ID NO: 319
  source: /note="Description of Artificial Sequence: Synthetic polypeptide"

SEQ ID NO: 321 - protein, 539 aa, Artificial Sequence
  source: /note="Description of Artificial Sequence: Synthetic polypeptide"
MSKGEELFTGVVPILVELDGDVNGHKFSVSGEGEGDATYGKLTLKLICTTGKLPVPWPTLVTTLGYGLQCFARYPDHMKQHDFFKSAMPEGYVQERTIFFKDDGNYKTRAEVKFEGDTLVNRIELKGIDFKEDGNILGHKLEYNYNSHNVYITADKQKNGIKANFKIRHNIEDGGVQLADHYQQNTPIGDGPVLLPDNHYLSYQSALSKDPNEKRDHMVLLEFVTAAGITHGMDELYKRVANFGHTCWKLQRPYVVKGMISIACGLFGRELFNNRHLFSWGLMWKAFFALVPILSFNFFAAIMNQIYDVDIDRINKPDLPLVSGEMSIETAWILSIIVALTGLIVTIKLKSAPLFVFIYIFGIFAGFAYSVPPIRWKQYPFTNFLITISSHVGLAFTSYSATTSALGLPFVWRPAFSFIIAFMTVMGMTIAFAKDISDIEGDAKYGVSTVATKLGARNMTFVVSGVLLLNYLVSISIGIIWPQVFKSNIMILSHAILAFCLIFQTRELALANYASAPSRQFFEFIWLLYYAEYFVYVFI

SEQ ID NO: 322 - protein, 539 aa, Artificial Sequence
  source: /note="Description of Artificial Sequence: Synthetic polypeptide"
MSKGEELFTGVVPILVELDGDVNGHKFSVSGEGEGDATYGKLTLKLICTTGKLPVPWPTLVTTLGYGLQCFARYPDHMKQHDFFKSAMPEGYVQERTIFFKDDGNYKTRAEVKFEGDTLVNRIELKGIDFKEDGNILGHKLEYNYNSHNVYITADKQKNGIKANFKIRHNIEDGGVQLADHYQQNTPIGDGPVLLPDNHYLSYQSALSKDPNEKRDHMVLLEFVTAAGITHGMDELYKKILDFGHTCWKLQRPYVVKGMISIACGLFGRELFNNRHLFSWGLMWKAFFALVPILSFNFFAAIMNQIYDVDIDRINKPDLPLVSGEMSIETAWILSIIVALTGLIVTIKLKSAPLFVFIYIFGIFAGFAYSVPPIRWKQYPFTNFLITISSHVGLAFTSYSATTSALGLPFVWRPAFSFIIAFMTVMGMTIAFAKDISDIEGDAKYGVSTVATKLGARNMTFVVSGVLLLNYLVSISIGIIWPQVFKSNIMILSHAILAFCLIFQTRELALANYASAPSRQFFEFIWLLYYAEYFVYVFI

SEQ ID NO: 323 - protein, 539 aa, Artificial Sequence
  source: /note="Description of Artificial Sequence: Synthetic polypeptide"
MSKGEELFTGVVPILVELDGDVNGHKFSVSGEGEGDATYGKLTLKLICTTGKLPVPWPTLVTTLGYGLQCFARYPDHMKQHDFFKSAMPEGYVQERTIFFKDDGNYKTRAEVKFEGDTLVNRIELKGIDFKEDGNILGHKLEYNYNSHNVYITADKQKNGIKANFKIRHNIEDGGVQLADHYQQNTPIGDGPVLLPDNHYLSYQSALSKDPNEKRDHMVLLEFVTAAGITHGMDELYKKILQFGHTCWKLQRPYVVKGMISIACGLFGRELFNNRHLFSWGLMWKAFFALVPILSFNFFAAIMNQIYDVDIDRINKPDLPLVSGEMSIETAWILSIIVALTGLIVTIKLKSAPLFVFIYIFGIFAGFAYSVPPIRWKQYPFTNFLITISSHVGLAFTSYSATTSALGLPFVWRPAFSFIIAFMTVMGMTIAFAKDISDIEGDAKYGVSTVATKLGARNMTFVVSGVLLLNYLVSISIGIIWPQVFKSNIMILSHAILAFCLIFQTRELALANYASAPSRQFFEFIWLLYYAEYFVYVFI

SEQ ID NO: 324 - protein, 539 aa, Artificial Sequence
  source: /note="Description of Artificial Sequence: Synthetic polypeptide"
MSKGEELFTGVVPILVELDGDVNGHKFSVSGEGEGDATYGKLTLKLICTTGKLPVPWPTLVTTLGYGLQCFARYPDHMKQHDFFKSAMPEGYVQERTIFFKDDGNYKTRAEVKFEGDTLVNRIELKGIDFKEDGNILGHKLEYNYNSHNVYITADKQKNGIKANFKIRHNIEDGGVQLADHYQQNTPIGDGPVLLPDNHYLSYQSALSKDPNEKRDHMVLLEFVTAAGITHGMDELYKKILNFLKTCWKLQRPYVVKGMISIACGLFGRELFNNRHLFSWGLMWKAFFALVPILSFNFFAAIMNQIYDVDIDRINKPDLPLVSGEMSIETAWILSIIVALTGLIVTIKLKSAPLFVFIYIFGIFAGFAYSVPPIRWKQYPFTNFLITISSHVGLAFTSYSATTSALGLPFVWRPAFSFIIAFMTVMGMTIAFAKDISDIEGDAKYGVSTVATKLGARNMTFVVSGVLLLNYLVSISIGIIWPQVFKSNIMILSHAILAFCLIFQTRELALANYASAPSRQFFEFIWLLYYAEYFVYVFI

SEQ ID NO: 325 - protein, 539 aa, Artificial Sequence
  source: /note="Description of Artificial Sequence: Synthetic polypeptide"
MSKGEELFTGVVPILVELDGDVNGHKFSVSGEGEGDATYGKLTLKLICTTGKLPVPWPTLVTTLGYGLQCFARYPDHMKQHDFFKSAMPEGYVQERTIFFKDDGNYKTRAEVKFEGDTLVNRIELKGIDFKEDGNILGHKLEYNYNSHNVYITADKQKNGIKANFKIRHNIEDGGVQLADHYQQNTPIGDGPVLLPDNHYLSYQSALSKDPNEKRDHMVLLEFVTAAGITHGMDELYKKILNFGHTCWRLQRPYVVKGMISIACGLFGRELFNNRHLFSWGLMWKAFFALVPILSFNFFAAIMNQIYDVDIDRINKPDLPLVSGEMSIETAWILSIIVALTGLIVTIKLKSAPLFVFIYIFGIFAGFAYSVPPIRWKQYPFTNFLITISSHVGLAFTSYSATTSALGLPFVWRPAFSFIIAFMTVMGMTIAFAKDISDIEGDAKYGVSTVATKLGARNMTFVVSGVLLLNYLVSISIGIIWPQVFKSNIMILSHAILAFCLIFQTRELALANYASAPSRQFFEFIWLLYYAEYFVYVFI

SEQ ID NO: 326 - protein, 539 aa, Artificial Sequence
  source: /note="Description of Artificial Sequence: Synthetic polypeptide"
MSKGEELFTGVVPILVELDGDVNGHKFSVSGEGEGDATYGKLTLKLICTTGKLPVPWPTLVTTLGYGLQCFARYPDHMKQHDFFKSAMPEGYVQERTIFFKDDGNYKTRAEVKFEGDTLVNRIELKGIDFKEDGNILGHKLEYNYNSHNVYITADKQKNGIKANFKIRHNIEDGGVQLADHYQQNTPIGDGPVLLPDNHYLSYQSALSKDPNEKRDHMVLLEFVTAAGITHGMDELYKKILNFGHTCWKLQRPYVVKGMISIASGLFGRELFNNRHLFSWGLMWKAFFALVPILSFNFFAAIMNQIYDVDIDRINKPDLPLVSGEMSIETAWILSIIVALTGLIVTIKLKSAPLFVFIYIFGIFAGFAYSVPPIRWKQYPFTNFLITISSHVGLAFTSYSATTSALGLPFVWRPAFSFIIAFMTVMGMTIAFAKDISDIEGDAKYGVSTVATKLGARNMTFVVSGVLLLNYLVSISIGIIWPQVFKSNIMILSHAILAFCLIFQTRELALANYASAPSRQFFEFIWLLYYAEYFVYVFI

SEQ ID NO: 327 - protein, 539 aa, Artificial Sequence
  source: /note="Description of Artificial Sequence: Synthetic polypeptide"
MSKGEELFTGVVPILVELDGDVNGHKFSVSGEGEGDATYGKLTLKLICTTGKLPVPWPTLVTTLGYGLQCFARYPDHMKQHDFFKSAMPEGYVQERTIFFKDDGNYKTRAEVKFEGDTLVNRIELKGIDFKEDGNILGHKLEYNYNSHNVYITADKQKNGIKANFKIRHNIEDGGVQLADHYQQNTPIGDGPVLLPDNHYLSYQSALSKDPNEKRDHMVLLEFVTAAGITHGMDELYKKILNFGHTCWKLQRPYVVKGMISIACGLFGRELINNRHLFSWGLMWKAFFALVPILSFNFFAAIMNQIYDVDIDRINKPDLPLVSGEMSIETAWILSIIVALTGLIVTIKLKSAPLFVFIYIFGIFAGFAYSVPPIRWKQYPFTNFLITISSHVGLAFTSYSATTSALGLPFVWRPAFSFIIAFMTVMGMTIAFAKDISDIEGDAKYGVSTVATKLGARNMTFVVSGVLLLNYLVSISIGIIWPQVFKSNIMILSHAILAFCLIFQTRELALANYASAPSRQFFEFIWLLYYAEYFVYVFI

SEQ ID NO: 328 - protein, 539 aa, Artificial Sequence
  source: /note="Description of Artificial Sequence: Synthetic polypeptide"
MSKGEELFTGVVPILVELDGDVNGHKFSVSGEGEGDATYGKLTLKLICTTGKLPVPWPTLVTTLGYGLQCFARYPDHMKQHDFFKSAMPEGYVQERTIFFKDDGNYKTRAEVKFEGDTLVNRIELKGIDFKEDGNILGHKLEYNYNSHNVYITADKQKNGIKANFKIRHNIEDGGVQLADHYQQNTPIGDGPVLLPDNHYLSYQSALSKDPNEKRDHMVLLEFVTAAGITHGMDELYKKILNFGHTCWKLQRPYVVKGMISIACGLFGRELFNNPHLFSWGLMWKAFFALVPILSFNFFAAIMNQIYDVDIDRINKPDLPLVSGEMSIETAWILSIIVALTGLIVTIKLKSAPLFVFIYIFGIFAGFAYSVPPIRWKQYPFTNFLITISSHVGLAFTSYSATTSALGLPFVWRPAFSFIIAFMTVMGMTIAFAKDISDIEGDAKYGVSTVATKLGARNMTFVVSGVLLLNYLVSISIGIIWPQVFKSNIMILSHAILAFCLIFQTRELALANYASAPSRQFFEFIWLLYYAEYFVYVFI

SEQ ID NO: 329 - protein, 539 aa, Artificial Sequence
  source: /note="Description of Artificial Sequence: Synthetic polypeptide"
MSKGEELFTGVVPILVELDGDVNGHKFSVSGEGEGDATYGKLTLKLICTTGKLPVPWPTLVTTLGYGLQCFARYPDHMKQHDFFKSAMPEGYVQERTIFFKDDGNYKTRAEVKFEGDTLVNRIELKGIDFKEDGNILGHKLEYNYNSHNVYITADKQKNGIKANFKIRHNIEDGGVQLADHYQQNTPIGDGPVLLPDNHYLSYQSALSKDPNEKRDHMVLLEFVTAAGITHGMDELYKKILNFGHTCWKLQRPYVVKGMISIACGLFGRELFNNKHLFSWGLMWKAFFALVPILSFNFFAAIMNQIYDVDIDRINKPDLPLVSGEMSIETAWILSIIVALTGLIVTIKLKSAPLFVFIYIFGIFAGFAYSVPPIRWKQYPFTNFLITISSHVGLAFTSYSATTSALGLPFVWRPAFSFIIAFMTVMGMTIAFAKDISDIEGDAKYGVSTVATKLGARNMTFVVSGVLLLNYLVSISIGIIWPQVFKSNIMILSHAILAFCLIFQTRELALANYASAPSRQFFEFIWLLYYAEYFVYVFI

SEQ ID NO: 330 - protein, 539 aa, Artificial Sequence
  source: /note="Description of Artificial Sequence: Synthetic polypeptide"
MSKGEELFTGVVPILVELDGDVNGHKFSVSGEGEGDATYGKLTLKLICTTGKLPVPWPTLVTTLGYGLQCFARYPDHMKQHDFFKSAMPEGYVQERTIFFKDDGNYKTRAEVKFEGDTLVNRIELKGIDFKEDGNILGHKLEYNYNSHNVYITADKQKNGIKANFKIRHNIEDGGVQLADHYQQNTPIGDGPVLLPDNHYLSYQSALSKDPNEKRDHMVLLEFVTAAGITHGMDELYKKILNFGHTCWKLQRPYVVKGMISIACGLFGRELFNNRHLFSWGLIWKAFFALVPILSFNFFAAIMNQIYDVDIDRINKPDLPLVSGEMSIETAWILSIIVALTGLIVTIKLKSAPLFVFIYIFGIFAGFAYSVPPIRWKQYPFTNFLITISSHVGLAFTSYSATTSALGLPFVWRPAFSFIIAFMTVMGMTIAFAKDISDIEGDAKYGVSTVATKLGARNMTFVVSGVLLLNYLVSISIGIIWPQVFKSNIMILSHAILAFCLIFQTRELALANYASAPSRQFFEFIWLLYYAEYFVYVFI

SEQ ID NO: 331 - protein, 539 aa, Artificial Sequence
  source: /note="Description of Artificial Sequence: Synthetic polypeptide"
MSKGEELFTGVVPILVELDGDVNGHKFSVSGEGEGDATYGKLTLKLICTTGKLPVPWPTLVTTLGYGLQCFARYPDHMKQHDFFKSAMPEGYVQERTIFFKDDGNYKTRAEVKFEGDTLVNRIELKGIDFKEDGNILGHKLEYNYNSHNVYITADKQKNGIKANFKIRHNIEDGGVQLADHYQQNTPIGDGPVLLPDNHYLSYQSALSKDPNEKRDHMVLLEFVTAAGITHGMDELYKKILNFGHTCWKLQRPYVVKGMISIACGLFGRELFNNRHLFSWGLCFKAFFALVPILSFNFFAAIMNQIYDVDIDRINKPDLPLVSGEMSIETAWILSIIVALTGLIVTIKLKSAPLFVFIYIFGIFAGFAYSVPPIRWKQYPFTNFLITISSHVGLAFTSYSATTSALGLPFVWRPAFSFIIAFMTVMGMTIAFAKDISDIEGDAKYGVSTVATKLGARNMTFVVSGVLLLNYLVSISIGIIWPQVFKSNIMILSHAILAFCLIFQTRELALANYASAPSRQFFEFIWLLYYAEYFVYVFI

SEQ ID NO: 332 - protein, 539 aa, Artificial Sequence
  source: /note="Description of Artificial Sequence: Synthetic polypeptide"
MSKGEELFTGVVPILVELDGDVNGHKFSVSGEGEGDATYGKLTLKLICTTGKLPVPWPTLVTTLGYGLQCFARYPDHMKQHDFFKSAMPEGYVQERTIFFKDDGNYKTRAEVKFEGDTLVNRIELKGIDFKEDGNILGHKLEYNYNSHNVYITADKQKNGIKANFKIRHNIEDGGVQLADHYQQNTPIGDGPVLLPDNHYLSYQSALSKDPNEKRDHMVLLEFVTAAGITHGMDELYKKILNFGHTCWKLQRPYVVKGMISIACGLFGRELFNNRHLFSWGLMWKALFALVPILSFNFFAAIMNQIYDVDIDRINKPDLPLVSGEMSIETAWILSIIVALTGLIVTIKLKSAPLFVFIYIFGIFAGFAYSVPPIRWKQYPFTNFLITISSHVGLAFTSYSATTSALGLPFVWRPAFSFIIAFMTVMGMTIAFAKDISDIEGDAKYGVSTVATKLGARNMTFVVSGVLLLNYLVSISIGIIWPQVFKSNIMILSHAILAFCLIFQTRELALANYASAPSRQFFEFIWLLYYAEYFVYVFI

SEQ ID NO: 333 - protein, 539 aa, Artificial Sequence
  source: /note="Description of Artificial Sequence: Synthetic polypeptide"
MSKGEELFTGVVPILVELDGDVNGHKFSVSGEGEGDATYGKLTLKLICTTGKLPVPWPTLVTTLGYGLQCFARYPDHMKQHDFFKSAMPEGYVQERTIFFKDDGNYKTRAEVKFEGDTLVNRIELKGIDFKEDGNILGHKLEYNYNSHNVYITADKQKNGIKANFKIRHNIEDGGVQLADHYQQNTPIGDGPVLLPDNHYLSYQSALSKDPNEKRDHMVLLEFVTAAGITHGMDELYKKILNFGHTCWKLQRPYVVKGMISIACGLFGRELFNNRHLFSWGLMWKAFFALVPILCFNFFAAIMNQIYDVDIDRINKPDLPLVSGEMSIETAWILSIIVALTGLIVTIKLKSAPLFVFIYIFGIFAGFAYSVPPIRWKQYPFTNFLITISSHVGLAFTSYSATTSALGLPFVWRPAFSFIIAFMTVMGMTIAFAKDISDIEGDAKYGVSTVATKLGARNMTFVVSGVLLLNYLVSISIGIIWPQVFKSNIMILSHAILAFCLIFQTRELALANYASAPSRQFFEFIWLLYYAEYFVYVFI

SEQ ID NO: 334 - protein, 539 aa, Artificial Sequence
  source: /note="Description of Artificial Sequence: Synthetic polypeptide"
MSKGEELFTGVVPILVELDGDVNGHKFSVSGEGEGDATYGKLTLKLICTTGKLPVPWPTLVTTLGYGLQCFARYPDHMKQHDFFKSAMPEGYVQERTIFFKDDGNYKTRAEVKFEGDTLVNRIELKGIDFKEDGNILGHKLEYNYNSHNVYITADKQKNGIKANFKIRHNIEDGGVQLADHYQQNTPIGDGPVLLPDNHYLSYQSALSKDPNEKRDHMVLLEFVTAAGITHGMDELYKKILNFGHTCWKLQRPYVVKGMISIACGLFGRELFNNRHLFSWGLMWKAFFALVPILSFNGFAAIMNQIYDVDIDRINKPDLPLVSGEMSIETAWILSIIVALTGLIVTIKLKSAPLFVFIYIFGIFAGFAYSVPPIRWKQYPFTNFLITISSHVGLAFTSYSATTSALGLPFVWRPAFSFIIAFMTVMGMTIAFAKDISDIEGDAKYGVSTVATKLGARNMTFVVSGVLLLNYLVSISIGIIWPQVFKSNIMILSHAILAFCLIFQTRELALANYASAPSRQFFEFIWLLYYAEYFVYVFI

SEQ ID NO: 335 - protein, 539 aa, Artificial Sequence
  source: /note="Description of Artificial Sequence: Synthetic polypeptide"
MSKGEELFTGVVPILVELDGDVNGHKFSVSGEGEGDATYGKLTLKLICTTGKLPVPWPTLVTTLGYGLQCFARYPDHMKQHDFFKSAMPEGYVQERTIFFKDDGNYKTRAEVKFEGDTLVNRIELKGIDFKEDGNILGHKLEYNYNSHNVYITADKQKNGIKANFKIRHNIEDGGVQLADHYQQNTPIGDGPVLLPDNHYLSYQSALSKDPNEKRDHMVLLEFVTAAGITHGMDELYKKILNFGHTCWKLQRPYVVKGMISIACGLFGRELFNNRHLFSWGLMWKAFFALVPILSFNFFAAIMNQIYDIDIDRINKPDLPLVSGEMSIETAWILSIIVALTGLIVTIKLKSAPLFVFIYIFGIFAGFAYSVPPIRWKQYPFTNFLITISSHVGLAFTSYSATTSALGLPFVWRPAFSFIIAFMTVMGMTIAFAKDISDIEGDAKYGVSTVATKLGARNMTFVVSGVLLLNYLVSISIGIIWPQVFKSNIMILSHAILAFCLIFQTRELALANYASAPSRQFFEFIWLLYYAEYFVYVFI

SEQ ID NO: 336 - protein, 539 aa, Artificial Sequence
  source: /note="Description of Artificial Sequence: Synthetic polypeptide"
MSKGEELFTGVVPILVELDGDVNGHKFSVSGEGEGDATYGKLTLKLICTTGKLPVPWPTLVTTLGYGLQCFARYPDHMKQHDFFKSAMPEGYVQERTIFFKDDGNYKTRAEVKFEGDTLVNRIELKGIDFKEDGNILGHKLEYNYNSHNVYITADKQKNGIKANFKIRHNIEDGGVQLADHYQQNTPIGDGPVLLPDNHYLSYQSALSKDPNEKRDHMVLLEFVTAAGITHGMDELYKKILNFGHTCWKLQRPYVVKGMISIACGLFGRELFNNRHLFSWGLMWKAFFALVPILSFNFFAAIMNQIYDVDIDRVNKPDLPLVSGEMSIETAWILSIIVALTGLIVTIKLKSAPLFVFIYIFGIFAGFAYSVPPIRWKQYPFTNFLITISSHVGLAFTSYSATTSALGLPFVWRPAFSFIIAFMTVMGMTIAFAKDISDIEGDAKYGVSTVATKLGARNMTFVVSGVLLLNYLVSISIGIIWPQVFKSNIMILSHAILAFCLIFQTRELALANYASAPSRQFFEFIWLLYYAEYFVYVFI

SEQ ID NO: 337 - protein, 539 aa, Artificial Sequence
  source: /note="Description of Artificial Sequence: Synthetic polypeptide"
MSKGEELFTGVVPILVELDGDVNGHKFSVSGEGEGDATYGKLTLKLICTTGKLPVPWPTLVTTLGYGLQCFARYPDHMKQHDFFKSAMPEGYVQERTIFFKDDGNYKTRAEVKFEGDTLVNRIELKGIDFKEDGNILGHKLEYNYNSHNVYITADKQKNGIKANFKIRHNIEDGGVQLADHYQQNTPIGDGPVLLPDNHYLSYQSALSKDPNEKRDHMVLLEFVTAAGITHGMDELYKKILNFGHTCWKLQRPYVVKGMISIACGLFGRELFNNRHLFSWGLMWKAFFALVPILSFNFFAAIMNQIYDVDIDRINKPDLPLVAGEMSIETAWILSIIVALTGLIVTIKLKSAPLFVFIYIFGIFAGFAYSVPPIRWKQYPFTNFLITISSHVGLAFTSYSATTSALGLPFVWRPAFSFIIAFMTVMGMTIAFAKDISDIEGDAKYGVSTVATKLGARNMTFVVSGVLLLNYLVSISIGIIWPQVFKSNIMILSHAILAFCLIFQTRELALANYASAPSRQFFEFIWLLYYAEYFVYVFI

SEQ ID NO: 338 - protein, 539 aa, Artificial Sequence
  source: /note="Description of Artificial Sequence: Synthetic polypeptide"
MSKGEELFTGVVPILVELDGDVNGHKFSVSGEGEGDATYGKLTLKLICTTGKLPVPWPTLVTTLGYGLQCFARYPDHMKQHDFFKSAMPEGYVQERTIFFKDDGNYKTRAEVKFEGDTLVNRIELKGIDFKEDGNILGHKLEYNYNSHNVYITADKQKNGIKANFKIRHNIEDGGVQLADHYQQNTPIGDGPVLLPDNHYLSYQSALSKDPNEKRDHMVLLEFVTAAGITHGMDELYKKILNFGHTCWKLQRPYVVKGMISIACGLFGRELFNNRHLFSWGLMWKAFFALVPILSFNFFAAIMNQIYDVDIDRINKPDLPLVTGEMSIETAWILSIIVALTGLIVTIKLKSAPLFVFIYIFGIFAGFAYSVPPIRWKQYPFTNFLITISSHVGLAFTSYSATTSALGLPFVWRPAFSFIIAFMTVMGMTIAFAKDISDIEGDAKYGVSTVATKLGARNMTFVVSGVLLLNYLVSISIGIIWPQVFKSNIMILSHAILAFCLIFQTRELALANYASAPSRQFFEFIWLLYYAEYFVYVFI

SEQ ID NO: 339 - protein, 539 aa, Artificial Sequence
  source: /note="Description of Artificial Sequence: Synthetic polypeptide"
MSKGEELFTGVVPILVELDGDVNGHKFSVSGEGEGDATYGKLTLKLICTTGKLPVPWPTLVTTLGYGLQCFARYPDHMKQHDFFKSAMPEGYVQERTIFFKDDGNYKTRAEVKFEGDTLVNRIELKGIDFKEDGNILGHKLEYNYNSHNVYITADKQKNGIKANFKIRHNIEDGGVQLADHYQQNTPIGDGPVLLPDNHYLSYQSALSKDPNEKRDHMVLLEFVTAAGITHGMDELYKKILNFGHTCWKLQRPYVVKGMISIACGLFGRELFNNRHLFSWGLMWKAFFALVPILSFNFFAAIMNQIYDVDIDRINKPDLPLVSGEISIETAWILSIIVALTGLIVTIKLKSAPLFVFIYIFGIFAGFAYSVPPIRWKQYPFTNFLITISSHVGLAFTSYSATTSALGLPFVWRPAFSFIIAFMTVMGMTIAFAKDISDIEGDAKYGVSTVATKLGARNMTFVVSGVLLLNYLVSISIGIIWPQVFKSNIMILSHAILAFCLIFQTRELALANYASAPSRQFFEFIWLLYYAEYFVYVFI

SEQ ID NO: 340 - protein, 539 aa, Artificial Sequence
  source: /note="Description of Artificial Sequence: Synthetic polypeptide"
MSKGEELFTGVVPILVELDGDVNGHKFSVSGEGEGDATYGKLTLKLICTTGKLPVPWPTLVTTLGYGLQCFARYPDHMKQHDFFKSAMPEGYVQERTIFFKDDGNYKTRAEVKFEGDTLVNRIELKGIDFKEDGNILGHKLEYNYNSHNVYITADKQKNGIKANFKIRHNIEDGGVQLADHYQQNTPIGDGPVLLPDNHYLSYQSALSKDPNEKRDHMVLLEFVTAAGITHGMDELYKKILNFGHTCWKLQRPYVVKGMISIACGLFGRELFNNRHLFSWGLMWKAFFALVPILSFNFFAAIMNQIYDVDIDRINKPDLPLVSGEMSIQTAWILSIIVALTGLIVTIKLKSAPLFVFIYIFGIFAGFAYSVPPIRWKQYPFTNFLITISSHVGLAFTSYSATTSALGLPFVWRPAFSFIIAFMTVMGMTIAFAKDISDIEGDAKYGVSTVATKLGARNMTFVVSGVLLLNYLVSISIGIIWPQVFKSNIMILSHAILAFCLIFQTRELALANYASAPSRQFFEFIWLLYYAEYFVYVFI

SEQ ID NO: 341 - protein, 539 aa, Artificial Sequence
  source: /note="Description of Artificial Sequence: Synthetic polypeptide"
MSKGEELFTGVVPILVELDGDVNGHKFSVSGEGEGDATYGKLTLKLICTTGKLPVPWPTLVTTLGYGLQCFARYPDHMKQHDFFKSAMPEGYVQERTIFFKDDGNYKTRAEVKFEGDTLVNRIELKGIDFKEDGNILGHKLEYNYNSHNVYITADKQKNGIKANFKIRHNIEDGGVQLADHYQQNTPIGDGPVLLPDNHYLSYQSALSKDPNEKRDHMVLLEFVTAAGITHGMDELYKKILNFGHTCWKLQRPYVVKGMISIACGLFGRELFNNRHLFSWGLMWKAFFALVPILSFNFFAAIMNQIYDVDIDRINKPDLPLVSGEMSIETAWLLSIIVALTGLIVTIKLKSAPLFVFIYIFGIFAGFAYSVPPIRWKQYPFTNFLITISSHVGLAFTSYSATTSALGLPFVWRPAFSFIIAFMTVMGMTIAFAKDISDIEGDAKYGVSTVATKLGARNMTFVVSGVLLLNYLVSISIGIIWPQVFKSNIMILSHAILAFCLIFQTRELALANYASAPSRQFFEFIWLLYYAEYFVYVFI

SEQ ID NO: 342 - protein, 539 aa, Artificial Sequence
  source: /note="Description of Artificial Sequence: Synthetic polypeptide"
MSKGEELFTGVVPILVELDGDVNGHKFSVSGEGEGDATYGKLTLKLICTTGKLPVPWPTLVTTLGYGLQCFARYPDHMKQHDFFKSAMPEGYVQERTIFFKDDGNYKTRAEVKFEGDTLVNRIELKGIDFKEDGNILGHKLEYNYNSHNVYITADKQKNGIKANFKIRHNIEDGGVQLADHYQQNTPIGDGPVLLPDNHYLSYQSALSKDPNEKRDHMVLLEFVTAAGITHGMDELYKKILNFGHTCWKLQRPYVVKGMISIACGLFGRELFNNRHLFSWGLMWKAFFALVPILSFNFFAAIMNQIYDVDIDRINKPDLPLVSGEMSIETAWILSIIVALTGFIVTIKLKSAPLFVFIYIFGIFAGFAYSVPPIRWKQYPFTNFLITISSHVGLAFTSYSATTSALGLPFVWRPAFSFIIAFMTVMGMTIAFAKDISDIEGDAKYGVSTVATKLGARNMTFVVSGVLLLNYLVSISIGIIWPQVFKSNIMILSHAILAFCLIFQTRELALANYASAPSRQFFEFIWLLYYAEYFVYVFI

SEQ ID NO: 343 - protein, 539 aa, Artificial Sequence
  source: /note="Description of Artificial Sequence: Synthetic polypeptide"
MSKGEELFTGVVPILVELDGDVNGHKFSVSGEGEGDATYGKLTLKLICTTGKLPVPWPTLVTTLGYGLQCFARYPDHMKQHDFFKSAMPEGYVQERTIFFKDDGNYKTRAEVKFEGDTLVNRIELKGIDFKEDGNILGHKLEYNYNSHNVYITADKQKNGIKANFKIRHNIEDGGVQLADHYQQNTPIGDGPVLLPDNHYLSYQSALSKDPNEKRDHMVLLEFVTAAGITHGMDELYKKILNFGHTCWKLQRPYVVKGMISIACGLFGRELFNNRHLFSWGLMWKAFFALVPILSFNFFAAIMNQIYDVDIDRINKPDLPLVSGEMSIETAWILSIIVALTGLIVTIGLKSAPLFVFIYIFGIFAGFAYSVPPIRWKQYPFTNFLITISSHVGLAFTSYSATTSALGLPFVWRPAFSFIIAFMTVMGMTIAFAKDISDIEGDAKYGVSTVATKLGARNMTFVVSGVLLLNYLVSISIGIIWPQVFKSNIMILSHAILAFCLIFQTRELALANYASAPSRQFFEFIWLLYYAEYFVYVFI

SEQ ID NO: 344 - protein, 539 aa, Artificial Sequence
  source: /note="Description of Artificial Sequence: Synthetic polypeptide"
MSKGEELFTGVVPILVELDGDVNGHKFSVSGEGEGDATYGKLTLKLICTTGKLPVPWPTLVTTLGYGLQCFARYPDHMKQHDFFKSAMPEGYVQERTIFFKDDGNYKTRAEVKFEGDTLVNRIELKGIDFKEDGNILGHKLEYNYNSHNVYITADKQKNGIKANFKIRHNIEDGGVQLADHYQQNTPIGDGPVLLPDNHYLSYQSALSKDPNEKRDHMVLLEFVTAAGITHGMDELYKKILNFGHTCWKLQRPYVVKGMISIACGLFGRELFNNRHLFSWGLMWKAFFALVPILSFNFFAAIMNQIYDVDIDRINKPDLPLVSGEMSIETAWILSIIVALTGLIVTIKLNSAPLFVFIYIFGIFAGFAYSVPPIRWKQYPFTNFLITISSHVGLAFTSYSATTSALGLPFVWRPAFSFIIAFMTVMGMTIAFAKDISDIEGDAKYGVSTVATKLGARNMTFVVSGVLLLNYLVSISIGIIWPQVFKSNIMILSHAILAFCLIFQTRELALANYASAPSRQFFEFIWLLYYAEYFVYVFI

SEQ ID NO: 345 - protein, 539 aa, Artificial Sequence
  source: /note="Description of Artificial Sequence: Synthetic polypeptide"
MSKGEELFTGVVPILVELDGDVNGHKFSVSGEGEGDATYGKLTLKLICTTGKLPVPWPTLVTTLGYGLQCFARYPDHMKQHDFFKSAMPEGYVQERTIFFKDDGNYKTRAEVKFEGDTLVNRIELKGIDFKEDGNILGHKLEYNYNSHNVYITADKQKNGIKANFKIRHNIEDGGVQLADHYQQNTPIGDGPVLLPDNHYLSYQSALSKDPNEKRDHMVLLEFVTAAGITHGMDELYKKILNFGHTCWKLQRPYVVKGMISIACGLFGRELFNNRHLFSWGLMWKAFFALVPILSFNFFAAIMNQIYDVDIDRINKPDLPLVSGEMSIETAWILSIIVALTGLIVTIKLKSAPFFVFIYIFGIFAGFAYSVPPIRWKQYPFTNFLITISSHVGLAFTSYSATTSALGLPFVWRPAFSFIIAFMTVMGMTIAFAKDISDIEGDAKYGVSTVATKLGARNMTFVVSGVLLLNYLVSISIGIIWPQVFKSNIMILSHAILAFCLIFQTRELALANYASAPSRQFFEFIWLLYYAEYFVYVFI

SEQ ID NO: 346 - protein, 539 aa, Artificial Sequence
  source: /note="Description of Artificial Sequence: Synthetic polypeptide"
MSKGEELFTGVVPILVELDGDVNGHKFSVSGEGEGDATYGKLTLKLICTTGKLPVPWPTLVTTLGYGLQCFARYPDHMKQHDFFKSAMPEGYVQERTIFFKDDGNYKTRAEVKFEGDTLVNRIELKGIDFKEDGNILGHKLEYNYNSHNVYITADKQKNGIKANFKIRHNIEDGGVQLADHYQQNTPIGDGPVLLPDNHYLSYQSALSKDPNEKRDHMVLLEFVTAAGITHGMDELYKKILNFGHTCWKLQRPYVVKGMISIACGLFGRELFNNRHLFSWGLMWKAFFALVPILSFNFFAAIMNQIYDVDIDRINKPDLPLVSGEMSIETAWILSIIVALTGLIVTIKLKSAPVYIFIYIFGIFAGFAYSVPPIRWKQYPFTNFLITISSHVGLAFTSYSATTSALGLPFVWRPAFSFIIAFMTVMGMTIAFAKDISDIEGDAKYGVSTVATKLGARNMTFVVSGVLLLNYLVSISIGIIWPQVFKSNIMILSHAILAFCLIFQTRELALANYASAPSRQFFEFIWLLYYAEYFVYVFI

SEQ ID NO: 347 - protein, 539 aa, Artificial Sequence
  source: /note="Description of Artificial Sequence: Synthetic polypeptide"
MSKGEELFTGVVPILVELDGDVNGHKFSVSGEGEGDATYGKLTLKLICTTGKLPVPWPTLVTTLGYGLQCFARYPDHMKQHDFFKSAMPEGYVQERTIFFKDDGNYKTRAEVKFEGDTLVNRIELKGIDFKEDGNILGHKLEYNYNSHNVYITADKQKNGIKANFKIRHNIEDGGVQLADHYQQNTPIGDGPVLLPDNHYLSYQSALSKDPNEKRDHMVLLEFVTAAGITHGMDELYKKILNFGHTCWKLQRPYVVKGMISIACGLFGRELFNNRHLFSWGLMWKAFFALVPILSFNFFAAIMNQIYDVDIDRINKPDLPLVSGEMSIETAWILSIIVALTGLIVTIKLKSAPLFVYIYIFGIFAGFAYSVPPIRWKQYPFTNFLITISSHVGLAFTSYSATTSALGLPFVWRPAFSFIIAFMTVMGMTIAFAKDISDIEGDAKYGVSTVATKLGARNMTFVVSGVLLLNYLVSISIGIIWPQVFKSNIMILSHAILAFCLIFQTRELALANYASAPSRQFFEFIWLLYYAEYFVYVFI

SEQ ID NO: 348 - protein, 539 aa, Artificial Sequence
  source: /note="Description of Artificial Sequence: Synthetic polypeptide"
MSKGEELFTGVVPILVELDGDVNGHKFSVSGEGEGDATYGKLTLKLICTTGKLPVPWPTLVTTLGYGLQCFARYPDHMKQHDFFKSAMPEGYVQERTIFFKDDGNYKTRAEVKFEGDTLVNRIELKGIDFKEDGNILGHKLEYNYNSHNVYITADKQKNGIKANFKIRHNIEDGGVQLADHYQQNTPIGDGPVLLPDNHYLSYQSALSKDPNEKRDHMVLLEFVTAAGITHGMDELYKKILNFGHTCWKLQRPYVVKGMISIACGLFGRELFNNRHLFSWGLMWKAFFALVPILSFNFFAAIMNQIYDVDIDRINKPDLPLVSGEMSIETAWILSIIVALTGLIVTIKLKSAPLFVFIYCFGIFAGFAYSVPPIRWKQYPFTNFLITISSHVGLAFTSYSATTSALGLPFVWRPAFSFIIAFMTVMGMTIAFAKDISDIEGDAKYGVSTVATKLGARNMTFVVSGVLLLNYLVSISIGIIWPQVFKSNIMILSHAILAFCLIFQTRELALANYASAPSRQFFEFIWLLYYAEYFVYVFI

SEQ ID NO: 349 - protein, 539 aa, Artificial Sequence
  source: /note="Description of Artificial Sequence: Synthetic polypeptide"
MSKGEELFTGVVPILVELDGDVNGHKFSVSGEGEGDATYGKLTLKLICTTGKLPVPWPTLVTTLGYGLQCFARYPDHMKQHDFFKSAMPEGYVQERTIFFKDDGNYKTRAEVKFEGDTLVNRIELKGIDFKEDGNILGHKLEYNYNSHNVYITADKQKNGIKANFKIRHNIEDGGVQLADHYQQNTPIGDGPVLLPDNHYLSYQSALSKDPNEKRDHMVLLEFVTAAGITHGMDELYKKILNFGHTCWKLQRPYVVKGMISIACGLFGRELFNNRHLFSWGLMWKAFFALVPILSFNFFAAIMNQIYDVDIDRINKPDLPLVSGEMSIETAWILSIIVALTGLIVTIKLKSAPLFVFIYILGIFAGFAYSVPPIRWKQYPFTNFLITISSHVGLAFTSYSATTSALGLPFVWRPAFSFIIAFMTVMGMTIAFAKDISDIEGDAKYGVSTVATKLGARNMTFVVSGVLLLNYLVSISIGIIWPQVFKSNIMILSHAILAFCLIFQTRELALANYASAPSRQFFEFIWLLYYAEYFVYVFI

SEQ ID NO: 350 - protein, 539 aa, Artificial Sequence
  source: /note="Description of Artificial Sequence: Synthetic polypeptide"
MSKGEELFTGVVPILVELDGDVNGHKFSVSGEGEGDATYGKLTLKLICTTGKLPVPWPTLVTTLGYGLQCFARYPDHMKQHDFFKSAMPEGYVQERTIFFKDDGNYKTRAEVKFEGDTLVNRIELKGIDFKEDGNILGHKLEYNYNSHNVYITADKQKNGIKANFKIRHNIEDGGVQLADHYQQNTPIGDGPVLLPDNHYLSYQSALSKDPNEKRDHMVLLEFVTAAGITHGMDELYKKILNFGHTCWKLQRPYVVKGMISIACGLFGRELFNNRHLFSWGLMWKAFFALVPILSFNFFAAIMNQIYDVDIDRINKPDLPLVSGEMSIETAWILSIIVALTGLIVTIKLKSAPLFVFIYIFGLFAGFAYSVPPIRWKQYPFTNFLITISSHVGLAFTSYSATTSALGLPFVWRPAFSFIIAFMTVMGMTIAFAKDISDIEGDAKYGVSTVATKLGARNMTFVVSGVLLLNYLVSISIGIIWPQVFKSNIMILSHAILAFCLIFQTRELALANYASAPSRQFFEFIWLLYYAEYFVYVFI

SEQ ID NO: 351 - protein, 539 aa, Artificial Sequence
  source: /note="Description of Artificial Sequence: Synthetic polypeptide"
MSKGEELFTGVVPILVELDGDVNGHKFSVSGEGEGDATYGKLTLKLICTTGKLPVPWPTLVTTLGYGLQCFARYPDHMKQHDFFKSAMPEGYVQERTIFFKDDGNYKTRAEVKFEGDTLVNRIELKGIDFKEDGNILGHKLEYNYNSHNVYITADKQKNGIKANFKIRHNIEDGGVQLADHYQQNTPIGDGPVLLPDNHYLSYQSALSKDPNEKRDHMVLLEFVTAAGITHGMDELYKKILNFGHTCWKLQRPYVVKGMISIACGLFGRELFNNRHLFSWGLMWKAFFALVPILSFNFFAAIMNQIYDVDIDRINKPDLPLVSGEMSIETAWILSIIVALTGLIVTIKLKSAPLFVFIYIFGIFAGFAYSVPPLRWKQYPFTNFLITISSHVGLAFTSYSATTSALGLPFVWRPAFSFIIAFMTVMGMTIAFAKDISDIEGDAKYGVSTVATKLGARNMTFVVSGVLLLNYLVSISIGIIWPQVFKSNIMILSHAILAFCLIFQTRELALANYASAPSRQFFEFIWLLYYAEYFVYVFI

SEQ ID NO: 352 - protein, 539 aa, Artificial Sequence
  source: /note="Description of Artificial Sequence: Synthetic polypeptide"
MSKGEELFTGVVPILVELDGDVNGHKFSVSGEGEGDATYGKLTLKLICTTGKLPVPWPTLVTTLGYGLQCFARYPDHMKQHDFFKSAMPEGYVQERTIFFKDDGNYKTRAEVKFEGDTLVNRIELKGIDFKEDGNILGHKLEYNYNSHNVYITADKQKNGIKANFKIRHNIEDGGVQLADHYQQNTPIGDGPVLLPDNHYLSYQSALSKDPNEKRDHMVLLEFVTAAGITHGMDELYKKILNFGHTCWKLQRPYVVKGMISIACGLFGRELFNNRHLFSWGLMWKAFFALVPILSFNFFAAIMNQIYDVDIDRINKPDLPLVSGEMSIETAWILSIIVALTGLIVTIKLKSAPLFVFIYIFGIFAGFAYSVPPIRWKRYPFTNFLITISSHVGLAFTSYSATTSALGLPFVWRPAFSFIIAFMTVMGMTIAFAKDISDIEGDAKYGVSTVATKLGARNMTFVVSGVLLLNYLVSISIGIIWPQVFKSNIMILSHAILAFCLIFQTRELALANYASAPSRQFFEFIWLLYYAEYFVYVFI

SEQ ID NO: 353 - protein, 539 aa, Artificial Sequence
  source: /note="Description of Artificial Sequence: Synthetic polypeptide"
MSKGEELFTGVVPILVELDGDVNGHKFSVSGEGEGDATYGKLTLKLICTTGKLPVPWPTLVTTLGYGLQCFARYPDHMKQHDFFKSAMPEGYVQERTIFFKDDGNYKTRAEVKFEGDTLVNRIELKGIDFKEDGNILGHKLEYNYNSHNVYITADKQKNGIKANFKIRHNIEDGGVQLADHYQQNTPIGDGPVLLPDNHYLSYQSALSKDPNEKRDHMVLLEFVTAAGITHGMDELYKKILNFGHTCWKLQRPYVVKGMISIACGLFGRELFNNRHLFSWGLMWKAFFALVPILSFNFFAAIMNQIYDVDIDRINKPDLPLVSGEMSIETAWILSIIVALTGLIVTIKLKSAPLFVFIYIFGIFAGFAYSVPPIRWKQYPFANFLITISSHVGLAFTSYSATTSALGLPFVWRPAFSFIIAFMTVMGMTIAFAKDISDIEGDAKYGVSTVATKLGARNMTFVVSGVLLLNYLVSISIGIIWPQVFKSNIMILSHAILAFCLIFQTRELALANYASAPSRQFFEFIWLLYYAEYFVYVFI

SEQ ID NO: 354 - protein, 539 aa, Artificial Sequence
  source: /note="Description of Artificial Sequence: Synthetic polypeptide"
MSKGEELFTGVVPILVELDGDVNGHKFSVSGEGEGDATYGKLTLKLICTTGKLPVPWPTLVTTLGYGLQCFARYPDHMKQHDFFKSAMPEGYVQERTIFFKDDGNYKTRAEVKFEGDTLVNRIELKGIDFKEDGNILGHKLEYNYNSHNVYITADKQKNGIKANFKIRHNIEDGGVQLADHYQQNTPIGDGPVLLPDNHYLSYQSALSKDPNEKRDHMVLLEFVTAAGITHGMDELYKKILNFGHTCWKLQRPYVVKGMISIACGLFGRELFNNRHLFSWGLMWKAFFALVPILSFNFFAAIMNQIYDVDIDRINKPDLPLVSGEMSIETAWILSIIVALTGLIVTIKLKSAPLFVFIYIFGIFAGFAYSVPPIRWKQYPFTNFLITISSHVGLAFTVYSATTSALGLPFVWRPAFSFIIAFMTVMGMTIAFAKDISDIEGDAKYGVSTVATKLGARNMTFVVSGVLLLNYLVSISIGIIWPQVFKSNIMILSHAILAFCLIFQTRELALANYASAPSRQFFEFIWLLYYAEYFVYVFI

SEQ ID NO: 355 - protein, 539 aa, Artificial Sequence
  source: /note="Description of Artificial Sequence: Synthetic polypeptide"
MSKGEELFTGVVPILVELDGDVNGHKFSVSGEGEGDATYGKLTLKLICTTGKLPVPWPTLVTTLGYGLQCFARYPDHMKQHDFFKSAMPEGYVQERTIFFKDDGNYKTRAEVKFEGDTLVNRIELKGIDFKEDGNILGHKLEYNYNSHNVYITADKQKNGIKANFKIRHNIEDGGVQLADHYQQNTPIGDGPVLLPDNHYLSYQSALSKDPNEKRDHMVLLEFVTAAGITHGMDELYKKILNFGHTCWKLQRPYVVKGMISIACGLFGRELFNNRHLFSWGLMWKAFFALVPILSFNFFAAIMNQIYDVDIDRINKPDLPLVSGEMSIETAWILSIIVALTGLIVTIKLKSAPLFVFIYIFGIFAGFAYSVPPIRWKQYPFTNFLITISSHVGLAFTSYSASTSALGLPFVWRPAFSFIIAFMTVMGMTIAFAKDISDIEGDAKYGVSTVATKLGARNMTFVVSGVLLLNYLVSISIGIIWPQVFKSNIMILSHAILAFCLIFQTRELALANYASAPSRQFFEFIWLLYYAEYFVYVFI

SEQ ID NO: 356 - protein, 539 aa, Artificial Sequence
  source: /note="Description of Artificial Sequence: Synthetic polypeptide"
MSKGEELFTGVVPILVELDGDVNGHKFSVSGEGEGDATYGKLTLKLICTTGKLPVPWPTLVTTLGYGLQCFARYPDHMKQHDFFKSAMPEGYVQERTIFFKDDGNYKTRAEVKFEGDTLVNRIELKGIDFKEDGNILGHKLEYNYNSHNVYITADKQKNGIKANFKIRHNIEDGGVQLADHYQQNTPIGDGPVLLPDNHYLSYQSALSKDPNEKRDHMVLLEFVTAAGITHGMDELYKKILNFGHTCWKLQRPYVVKGMISIACGLFGRELFNNRHLFSWGLMWKAFFALVPILSFNFFAAIMNQIYDVDIDRINKPDLPLVSGEMSIETAWILSIIVALTGLIVTIKLKSAPLFVFIYIFGIFAGFAYSVPPIRWKQYPFTNFLITISSHVGLAFTSYSATTSALGLPFVWRPAFTFIIAFMTVMGMTIAFAKDISDIEGDAKYGVSTVATKLGARNMTFVVSGVLLLNYLVSISIGIIWPQVFKSNIMILSHAILAFCLIFQTRELALANYASAPSRQFFEFIWLLYYAEYFVYVFI

SEQ ID NO: 357 - protein, 539 aa, Artificial Sequence
  source: /note="Description of Artificial Sequence: Synthetic polypeptide"
MSKGEELFTGVVPILVELDGDVNGHKFSVSGEGEGDATYGKLTLKLICTTGKLPVPWPTLVTTLGYGLQCFARYPDHMKQHDFFKSAMPEGYVQERTIFFKDDGNYKTRAEVKFEGDTLVNRIELKGIDFKEDGNILGHKLEYNYNSHNVYITADKQKNGIKANFKIRHNIEDGGVQLADHYQQNTPIGDGPVLLPDNHYLSYQSALSKDPNEKRDHMVLLEFVTAAGITHGMDELYKKILNFGHTCWKLQRPYVVKGMISIACGLFGRELFNNRHLFSWGLMWKAFFALVPILSFNFFAAIMNQIYDVDIDRINKPDLPLVSGEMSIETAWILSIIVALTGLIVTIKLKSAPLFVFIYIFGIFAGFAYSVPPIRWKQYPFTNFLITISSHVGLAFTSYSATTSALGLPFVWRPAFSFIILFMTVMGMTIAFAKDISDIEGDAKYGVSTVATKLGARNMTFVVSGVLLLNYLVSISIGIIWPQVFKSNIMILSHAILAFCLIFQTRELALANYASAPSRQFFEFIWLLYYAEYFVYVFI

SEQ ID NO: 358 - protein, 539 aa, Artificial Sequence
  source: /note="Description of Artificial Sequence: Synthetic polypeptide"
MSKGEELFTGVVPILVELDGDVNGHKFSVSGEGEGDATYGKLTLKLICTTGKLPVPWPTLVTTLGYGLQCFARYPDHMKQHDFFKSAMPEGYVQERTIFFKDDGNYKTRAEVKFEGDTLVNRIELKGIDFKEDGNILGHKLEYNYNSHNVYITADKQKNGIKANFKIRHNIEDGGVQLADHYQQNTPIGDGPVLLPDNHYLSYQSALSKDPNEKRDHMVLLEFVTAAGITHGMDELYKKILNFGHTCWKLQRPYVVKGMISIACGLFGRELFNNRHLFSWGLMWKAFFALVPILSFNFFAAIMNQIYDVDIDRINKPDLPLVSGEMSIETAWILSIIVALTGLIVTIKLKSAPLFVFIYIFGIFAGFAYSVPPIRWKQYPFTNFLITISSHVGLAFTSYSATTSALGLPFVWRPAFSFIIAFMTVFGMTIAFAKDISDIEGDAKYGVSTVATKLGARNMTFVVSGVLLLNYLVSISIGIIWPQVFKSNIMILSHAILAFCLIFQTRELALANYASAPSRQFFEFIWLLYYAEYFVYVFI

SEQ ID NO: 359 - protein, 539 aa, Artificial Sequence
  source: /note="Description of Artificial Sequence: Synthetic polypeptide"
MSKGEELFTGVVPILVELDGDVNGHKFSVSGEGEGDATYGKLTLKLICTTGKLPVPWPTLVTTLGYGLQCFARYPDHMKQHDFFKSAMPEGYVQERTIFFKDDGNYKTRAEVKFEGDTLVNRIELKGIDFKEDGNILGHKLEYNYNSHNVYITADKQKNGIKANFKIRHNIEDGGVQLADHYQQNTPIGDGPVLLPDNHYLSYQSALSKDPNEKRDHMVLLEFVTAAGITHGMDELYKKILNFGHTCWKLQRPYVVKGMISIACGLFGRELFNNRHLFSWGLMWKAFFALVPILSFNFFAAIMNQIYDVDIDRINKPDLPLVSGEMSIETAWILSIIVALTGLIVTIKLKSAPLFVFIYIFGIFAGFAYSVPPIRWKQYPFTNFLITISSHVGLAFTSYSATTSALGLPFVWRPAFSFIIAFMTVMGLTIAFAKDISDIEGDAKYGVSTVATKLGARNMTFVVSGVLLLNYLVSISIGIIWPQVFKSNIMILSHAILAFCLIFQTRELALANYASAPSRQFFEFIWLLYYAEYFVYVFI

SEQ ID NO: 360 - protein, 539 aa, Artificial Sequence
  source: /note="Description of Artificial Sequence: Synthetic polypeptide"
MSKGEELFTGVVPILVELDGDVNGHKFSVSGEGEGDATYGKLTLKLICTTGKLPVPWPTLVTTLGYGLQCFARYPDHMKQHDFFKSAMPEGYVQERTIFFKDDGNYKTRAEVKFEGDTLVNRIELKGIDFKEDGNILGHKLEYNYNSHNVYITADKQKNGIKANFKIRHNIEDGGVQLADHYQQNTPIGDGPVLLPDNHYLSYQSALSKDPNEKRDHMVLLEFVTAAGITHGMDELYKKILNFGHTCWKLQRPYVVKGMISIACGLFGRELFNNRHLFSWGLMWKAFFALVPILSFNFFAAIMNQIYDVDIDRINKPDLPLVSGEMSIETAWILSIIVALTGLIVTIKLKSAPLFVFIYIFGIFAGFAYSVPPIRWKQYPFTNFLITISSHVGLAFTSYSATTSALGLPFVWRPAFSFIIAFMTVMGMTIAFAKDISDIEGDAKYGISTIATKLGARNMTFVVSGVLLLNYLVSISIGIIWPQVFKSNIMILSHAILAFCLIFQTRELALANYASAPSRQFFEFIWLLYYAEYFVYVFI

SEQ ID NO: 361 - protein, 539 aa, Artificial Sequence
  source: /note="Description of Artificial Sequence: Synthetic polypeptide"
MSKGEELFTGVVPILVELDGDVNGHKFSVSGEGEGDATYGKLTLKLICTTGKLPVPWPTLVTTLGYGLQCFARYPDHMKQHDFFKSAMPEGYVQERTIFFKDDGNYKTRAEVKFEGDTLVNRIELKGIDFKEDGNILGHKLEYNYNSHNVYITADKQKNGIKANFKIRHNIEDGGVQLADHYQQNTPIGDGPVLLPDNHYLSYQSALSKDPNEKRDHMVLLEFVTAAGITHGMDELYKKILNFGHTCWKLQRPYVVKGMISIACGLFGRELFNNRHLFSWGLMWKAFFALVPILSFNFFAAIMNQIYDVDIDRINKPDLPLVSGEMSIETAWILSIIVALTGLIVTIKLKSAPLFVFIYIFGIFAGFAYSVPPIRWKQYPFTNFLITISSHVGLAFTSYSATTSALGLPFVWRPAFSFIIAFMTVMGMTIAFAKDISDIEGDAKYGVTTVATKLGARNMTFVVSGVLLLNYLVSISIGIIWPQVFKSNIMILSHAILAFCLIFQTRELALANYASAPSRQFFEFIWLLYYAEYFVYVFI

SEQ ID NO: 362 - protein, 539 aa, Artificial Sequence
  source: /note="Description of Artificial Sequence: Synthetic polypeptide"
MSKGEELFTGVVPILVELDGDVNGHKFSVSGEGEGDATYGKLTLKLICTTGKLPVPWPTLVTTLGYGLQCFARYPDHMKQHDFFKSAMPEGYVQERTIFFKDDGNYKTRAEVKFEGDTLVNRIELKGIDFKEDGNILGHKLEYNYNSHNVYITADKQKNGIKANFKIRHNIEDGGVQLADHYQQNTPIGDGPVLLPDNHYLSYQSALSKDPNEKRDHMVLLEFVTAAGITHGMDELYKKILNFGHTCWKLQRPYVVKGMISIACGLFGRELFNNRHLFSWGLMWKAFFALVPILSFNFFAAIMNQIYDVDIDRINKPDLPLVSGEMSIETAWILSIIVALTGLIVTIKLKSAPLFVFIYIFGIFAGFAYSVPPIRWKQYPFTNFLITISSHVGLAFTSYSATTSALGLPFVWRPAFSFIIAFMTVMGMTIAFAKDISDIEGDAKYGVSTLATKLGARNMTFVVSGVLLLNYLVSISIGIIWPQVFKSNIMILSHAILAFCLIFQTRELALANYASAPSRQFFEFIWLLYYAEYFVYVFI

SEQ ID NO: 363 - protein, 539 aa, Artificial Sequence
  source: /note="Description of Artificial Sequence: Synthetic polypeptide"
MSKGEELFTGVVPILVELDGDVNGHKFSVSGEGEGDATYGKLTLKLICTTGKLPVPWPTLVTTLGYGLQCFARYPDHMKQHDFFKSAMPEGYVQERTIFFKDDGNYKTRAEVKFEGDTLVNRIELKGIDFKEDGNILGHKLEYNYNSHNVYITADKQKNGIKANFKIRHNIEDGGVQLADHYQQNTPIGDGPVLLPDNHYLSYQSALSKDPNEKRDHMVLLEFVTAAGITHGMDELYKKILNFGHTCWKLQRPYVVKGMISIACGLFGRELFNNRHLFSWGLMWKAFFALVPILSFNFFAAIMNQIYDVDIDRINKPDLPLVSGEMSIETAWILSIIVALTGLIVTIKLKSAPLFVFIYIFGIFAGFAYSVPPIRWKQYPFTNFLITISSHVGLAFTSYSATTSALGLPFVWRPAFSFIIAFMTVMGMTIAFAKDISDIEGDAKYGVSTVATKLGARNMSWLVSGVLLLNYLVSISIGIIWPQVFKSNIMILSHAILAFCLIFQTRELALANYASAPSRQFFEFIWLLYYAEYFVYVFI

SEQ ID NO: 364 - protein, 539 aa, Artificial Sequence
  source: /note="Description of Artificial Sequence: Synthetic polypeptide"
MSKGEELFTGVVPILVELDGDVNGHKFSVSGEGEGDATYGKLTLKLICTTGKLPVPWPTLVTTLGYGLQCFARYPDHMKQHDFFKSAMPEGYVQERTIFFKDDGNYKTRAEVKFEGDTLVNRIELKGIDFKEDGNILGHKLEYNYNSHNVYITADKQKNGIKANFKIRHNIEDGGVQLADHYQQNTPIGDGPVLLPDNHYLSYQSALSKDPNEKRDHMVLLEFVTAAGITHGMDELYKKILNFGHTCWKLQRPYVVKGMISIACGLFGRELFNNRHLFSWGLMWKAFFALVPILSFNFFAAIMNQIYDVDIDRINKPDLPLVSGEMSIETAWILSIIVALTGLIVTIKLKSAPLFVFIYIFGIFAGFAYSVPPIRWKQYPFTNFLITISSHVGLAFTSYSATTSALGLPFVWRPAFSFIIAFMTVMGMTIAFAKDISDIEGDAKYGVSTVATKLGARNMTFVVSGVLLLNYLASISIGIIWPQVFKSNIMILSHAILAFCLIFQTRELALANYASAPSRQFFEFIWLLYYAEYFVYVFI

SEQ ID NO: 365 - protein, 539 aa, Artificial Sequence
  source: /note="Description of Artificial Sequence: Synthetic polypeptide"
MSKGEELFTGVVPILVELDGDVNGHKFSVSGEGEGDATYGKLTLKLICTTGKLPVPWPTLVTTLGYGLQCFARYPDHMKQHDFFKSAMPEGYVQERTIFFKDDGNYKTRAEVKFEGDTLVNRIELKGIDFKEDGNILGHKLEYNYNSHNVYITADKQKNGIKANFKIRHNIEDGGVQLADHYQQNTPIGDGPVLLPDNHYLSYQSALSKDPNEKRDHMVLLEFVTAAGITHGMDELYKKILNFGHTCWKLQRPYVVKGMISIACGLFGRELFNNRHLFSWGLMWKAFFALVPILSFNFFAAIMNQIYDVDIDRINKPDLPLVSGEMSIETAWILSIIVALTGLIVTIKLKSAPLFVFIYIFGIFAGFAYSVPPIRWKQYPFTNFLITISSHVGLAFTSYSATTSALGLPFVWRPAFSFIIAFMTVMGMTIAFAKDISDIEGDAKYGVSTVATKLGARNMTFVVSGVLLLNYLVSILIGIIWPQVFKSNIMILSHAILAFCLIFQTRELALANYASAPSRQFFEFIWLLYYAEYFVYVFI

SEQ ID NO: 366 - protein, 539 aa, Artificial Sequence
  source: /note="Description of Artificial Sequence: Synthetic polypeptide"
MSKGEELFTGVVPILVELDGDVNGHKFSVSGEGEGDATYGKLTLKLICTTGKLPVPWPTLVTTLGYGLQCFARYPDHMKQHDFFKSAMPEGYVQERTIFFKDDGNYKTRAEVKFEGDTLVNRIELKGIDFKEDGNILGHKLEYNYNSHNVYITADKQKNGIKANFKIRHNIEDGGVQLADHYQQNTPIGDGPVLLPDNHYLSYQSALSKDPNEKRDHMVLLEFVTAAGITHGMDELYKKILNFGHTCWKLQRPYVVKGMISIACGLFGRELFNNRHLFSWGLMWKAFFALVPILSFNFFAAIMNQIYDVDIDRINKPDLPLVSGEMSIETAWILSIIVALTGLIVTIKLKSAPLFVFIYIFGIFAGFAYSVPPIRWKQYPFTNFLITISSHVGLAFTSYSATTSALGLPFVWRPAFSFIIAFMTVMGMTIAFAKDISDIEGDAKYGVSTVATKLGARNMTFVVSGVLLLNYLVSISIGIIMPQVFKSNIMILSHAILAFCLIFQTRELALANYASAPSRQFFEFIWLLYYAEYFVYVFI

SEQ ID NO: 367 - protein, 539 aa, Artificial Sequence
  source: /note="Description of Artificial Sequence: Synthetic polypeptide"
MSKGEELFTGVVPILVELDGDVNGHKFSVSGEGEGDATYGKLTLKLICTTGKLPVPWPTLVTTLGYGLQCFARYPDHMKQHDFFKSAMPEGYVQERTIFFKDDGNYKTRAEVKFEGDTLVNRIELKGIDFKEDGNILGHKLEYNYNSHNVYITADKQKNGIKANFKIRHNIEDGGVQLADHYQQNTPIGDGPVLLPDNHYLSYQSALSKDPNEKRDHMVLLEFVTAAGITHGMDELYKKILNFGHTCWKLQRPYVVKGMISIACGLFGRELFNNRHLFSWGLMWKAFFALVPILSFNFFAAIMNQIYDVDIDRINKPDLPLVSGEMSIETAWILSIIVALTGLIVTIKLKSAPLFVFIYIFGIFAGFAYSVPPIRWKQYPFTNFLITISSHVGLAFTSYSATTSALGLPFVWRPAFSFIIAFMTVMGMTIAFAKDISDIEGDAKYGVSTVATKLGARNMTFVVSGVLLLNYLVSISIGIIWPQAFKSNIMILSHAILAFCLIFQTRELALANYASAPSRQFFEFIWLLYYAEYFVYVFI

SEQ ID NO: 368 - protein, 539 aa, Artificial Sequence
  source: /note="Description of Artificial Sequence: Synthetic polypeptide"
MSKGEELFTGVVPILVELDGDVNGHKFSVSGEGEGDATYGKLTLKLICTTGKLPVPWPTLVTTLGYGLQCFARYPDHMKQHDFFKSAMPEGYVQERTIFFKDDGNYKTRAEVKFEGDTLVNRIELKGIDFKEDGNILGHKLEYNYNSHNVYITADKQKNGIKANFKIRHNIEDGGVQLADHYQQNTPIGDGPVLLPDNHYLSYQSALSKDPNEKRDHMVLLEFVTAAGITHGMDELYKKILNFGHTCWKLQRPYVVKGMISIACGLFGRELFNNRHLFSWGLMWKAFFALVPILSFNFFAAIMNQIYDVDIDRINKPDLPLVSGEMSIETAWILSIIVALTGLIVTIKLKSAPLFVFIYIFGIFAGFAYSVPPIRWKQYPFTNFLITISSHVGLAFTSYSATTSALGLPFVWRPAFSFIIAFMTVMGMTIAFAKDISDIEGDAKYGVSTVATKLGARNMTFVVSGVLLLNYLVSISIGIIWPQLFKSNVMVLSHAILAFCLIFQTRELALANYASAPSRQFFEFIWLLYYAEYFVYVFI

SEQ ID NO: 369 - protein, 539 aa, Artificial Sequence
  source: /note="Description of Artificial Sequence: Synthetic polypeptide"
MSKGEELFTGVVPILVELDGDVNGHKFSVSGEGEGDATYGKLTLKLICTTGKLPVPWPTLVTTLGYGLQCFARYPDHMKQHDFFKSAMPEGYVQERTIFFKDDGNYKTRAEVKFEGDTLVNRIELKGIDFKEDGNILGHKLEYNYNSHNVYITADKQKNGIKANFKIRHNIEDGGVQLADHYQQNTPIGDGPVLLPDNHYLSYQSALSKDPNEKRDHMVLLEFVTAAGITHGMDELYKKILNFGHTCWKLQRPYVVKGMISIACGLFGRELFNNRHLFSWGLMWKAFFALVPILSFNFFAAIMNQIYDVDIDRINKPDLPLVSGEMSIETAWILSIIVALTGLIVTIKLKSAPLFVFIYIFGIFAGFAYSVPPIRWKQYPFTNFLITISSHVGLAFTSYSATTSALGLPFVWRPAFSFIIAFMTVMGMTIAFAKDISDIEGDAKYGVSTVATKLGARNMTFVVSGVLLLNYLVSISIGIIWPQVFKSSIMILSHAILAFCLIFQTRELALANYASAPSRQFFEFIWLLYYAEYFVYVFI

SEQ ID NO: 370 - protein, 539 aa, Artificial Sequence
  source: /note="Description of Artificial Sequence: Synthetic polypeptide"
MSKGEELFTGVVPILVELDGDVNGHKFSVSGEGEGDATYGKLTLKLICTTGKLPVPWPTLVTTLGYGLQCFARYPDHMKQHDFFKSAMPEGYVQERTIFFKDDGNYKTRAEVKFEGDTLVNRIELKGIDFKEDGNILGHKLEYNYNSHNVYITADKQKNGIKANFKIRHNIEDGGVQLADHYQQNTPIGDGPVLLPDNHYLSYQSALSKDPNEKRDHMVLLEFVTAAGITHGMDELYKKILNFGHTCWKLQRPYVVKGMISIACGLFGRELFNNRHLFSWGLMWKAFFALVPILSFNFFAAIMNQIYDVDIDRINKPDLPLVSGEMSIETAWILSIIVALTGLIVTIKLKSAPLFVFIYIFGIFAGFAYSVPPIRWKQYPFTNFLITISSHVGLAFTSYSATTSALGLPFVWRPAFSFIIAFMTVMGMTIAFAKDISDIEGDAKYGVSTVATKLGARNMTFVVSGVLLLNYLVSISIGIIWPQVFKSNVMILSHAILAFCLIFQTRELALANYASAPSRQFFEFIWLLYYAEYFVYVFI

SEQ ID NO: 371 - protein, 539 aa, Artificial Sequence
  source: /note="Description of Artificial Sequence: Synthetic polypeptide"
MSKGEELFTGVVPILVELDGDVNGHKFSVSGEGEGDATYGKLTLKLICTTGKLPVPWPTLVTTLGYGLQCFARYPDHMKQHDFFKSAMPEGYVQERTIFFKDDGNYKTRAEVKFEGDTLVNRIELKGIDFKEDGNILGHKLEYNYNSHNVYITADKQKNGIKANFKIRHNIEDGGVQLADHYQQNTPIGDGPVLLPDNHYLSYQSALSKDPNEKRDHMVLLEFVTAAGITHGMDELYKKILNFGHTCWKLQRPYVVKGMISIACGLFGRELFNNRHLFSWGLMWKAFFALVPILSFNFFAAIMNQIYDVDIDRINKPDLPLVSGEMSIETAWILSIIVALTGLIVTIKLKSAPLFVFIYIFGIFAGFAYSVPPIRWKQYPFTNFLITISSHVGLAFTSYSATTSALGLPFVWRPAFSFIIAFMTVMGMTIAFAKDISDIEGDAKYGVSTVATKLGARNMTFVVSGVLLLNYLVSISIGIIWPQVFKSNIMILAHAILAFCLIFQTRELALANYASAPSRQFFEFIWLLYYAEYFVYVFI

SEQ ID NO: 372 - protein, 539 aa, Artificial Sequence
  source: /note="Description of Artificial Sequence: Synthetic polypeptide"
MSKGEELFTGVVPILVELDGDVNGHKFSVSGEGEGDATYGKLTLKLICTTGKLPVPWPTLVTTLGYGLQCFARYPDHMKQHDFFKSAMPEGYVQERTIFFKDDGNYKTRAEVKFEGDTLVNRIELKGIDFKEDGNILGHKLEYNYNSHNVYITADKQKNGIKANFKIRHNIEDGGVQLADHYQQNTPIGDGPVLLPDNHYLSYQSALSKDPNEKRDHMVLLEFVTAAGITHGMDELYKKILNFGHTCWKLQRPYVVKGMISIACGLFGRELFNNRHLFSWGLMWKAFFALVPILSFNFFAAIMNQIYDVDIDRINKPDLPLVSGEMSIETAWILSIIVALTGLIVTIKLKSAPLFVFIYIFGIFAGFAYSVPPIRWKQYPFTNFLITISSHVGLAFTSYSATTSALGLPFVWRPAFSFIIAFMTVMGMTIAFAKDISDIEGDAKYGVSTVATKLGARNMTFVVSGVLLLNYLVSISIGIIWPQVFKSNIMILSHIILAFCLIFQTRELALANYASAPSRQFFEFIWLLYYAEYFVYVFI

SEQ ID NO: 373 - protein, 539 aa, Artificial Sequence
  source: /note="Description of Artificial Sequence: Synthetic polypeptide"
MSKGEELFTGVVPILVELDGDVNGHKFSVSGEGEGDATYGKLTLKLICTTGKLPVPWPTLVTTLGYGLQCFARYPDHMKQHDFFKSAMPEGYVQERTIFFKDDGNYKTRAEVKFEGDTLVNRIELKGIDFKEDGNILGHKLEYNYNSHNVYITADKQKNGIKANFKIRHNIEDGGVQLADHYQQNTPIGDGPVLLPDNHYLSYQSALSKDPNEKRDHMVLLEFVTAAGITHGMDELYKKILNFGHTCWKLQRPYVVKGMISIACGLFGRELFNNRHLFSWGLMWKAFFALVPILSFNFFAAIMNQIYDVDIDRINKPDLPLVSGEMSIETAWILSIIVALTGLIVTIKLKSAPLFVFIYIFGIFAGFAYSVPPIRWKQYPFTNFLITISSHVGLAFTSYSATTSALGLPFVWRPAFSFIIAFMTVMGMTIAFAKDISDIEGDAKYGVSTVATKLGARNMTFVVSGVLLLNYLVSISIGIIWPQVFKSNIMILSHAILASCLIFQTRELALANYASAPSRQFFEFIWLLYYAEYFVYVFI

SEQ ID NO: 374 - protein, 539 aa, Artificial Sequence
  source: /note="Description of Artificial Sequence: Synthetic polypeptide"
MSKGEELFTGVVPILVELDGDVNGHKFSVSGEGEGDATYGKLTLKLICTTGKLPVPWPTLVTTLGYGLQCFARYPDHMKQHDFFKSAMPEGYVQERTIFFKDDGNYKTRAEVKFEGDTLVNRIELKGIDFKEDGNILGHKLEYNYNSHNVYITADKQKNGIKANFKIRHNIEDGGVQLADHYQQNTPIGDGPVLLPDNHYLSYQSALSKDPNEKRDHMVLLEFVTAAGITHGMDELYKKILNFGHTCWKLQRPYVVKGMISIACGLFGRELFNNRHLFSWGLMWKAFFALVPILSFNFFAAIMNQIYDVDIDRINKPDLPLVSGEMSIETAWILSIIVALTGLIVTIKLKSAPLFVFIYIFGIFAGFAYSVPPIRWKQYPFTNFLITISSHVGLAFTSYSATTSALGLPFVWRPAFSFIIAFMTVMGMTIAFAKDISDIEGDAKYGVSTVATKLGARNMTFVVSGVLLLNYLVSISIGIIWPQVFKSNIMILSHAILAFSLIFQTRELALANYASAPSRQFFEFIWLLYYAEYFVYVFI

SEQ ID NO: 375 - protein, 539 aa, Artificial Sequence
  source: /note="Description of Artificial Sequence: Synthetic polypeptide"
MSKGEELFTGVVPILVELDGDVNGHKFSVSGEGEGDATYGKLTLKLICTTGKLPVPWPTLVTTLGYGLQCFARYPDHMKQHDFFKSAMPEGYVQERTIFFKDDGNYKTRAEVKFEGDTLVNRIELKGIDFKEDGNILGHKLEYNYNSHNVYITADKQKNGIKANFKIRHNIEDGGVQLADHYQQNTPIGDGPVLLPDNHYLSYQSALSKDPNEKRDHMVLLEFVTAAGITHGMDELYKKILNFGHTCWKLQRPYVVKGMISIACGLFGRELFNNRHLFSWGLMWKAFFALVPILSFNFFAAIMNQIYDVDIDRINKPDLPLVSGEMSIETAWILSIIVALTGLIVTIKLKSAPLFVFIYIFGIFAGFAYSVPPIRWKQYPFTNFLITISSHVGLAFTSYSATTSALGLPFVWRPAFSFIIAFMTVMGMTIAFAKDISDIEGDAKYGVSTVATKLGARNMTFVVSGVLLLNYLVSISIGIIWPQVFKSNIMILSHAILAFCLIYQTRELALANYASAPSRQFFEFIWLLYYAEYFVYVFI

SEQ ID NO: 376 - protein, 539 aa, Artificial Sequence
  source: /note="Description of Artificial Sequence: Synthetic polypeptide"
MSKGEELFTGVVPILVELDGDVNGHKFSVSGEGEGDATYGKLTLKLICTTGKLPVPWPTLVTTLGYGLQCFARYPDHMKQHDFFKSAMPEGYVQERTIFFKDDGNYKTRAEVKFEGDTLVNRIELKGIDFKEDGNILGHKLEYNYNSHNVYITADKQKNGIKANFKIRHNIEDGGVQLADHYQQNTPIGDGPVLLPDNHYLSYQSALSKDPNEKRDHMVLLEFVTAAGITHGMDELYKKILNFGHTCWKLQRPYVVKGMISIACGLFGRELFNNRHLFSWGLMWKAFFALVPILSFNFFAAIMNQIYDVDIDRINKPDLPLVSGEMSIETAWILSIIVALTGLIVTIKLKSAPLFVFIYIFGIFAGFAYSVPPIRWKQYPFTNFLITISSHVGLAFTSYSATTSALGLPFVWRPAFSFIIAFMTVMGMTIAFAKDISDIEGDAKYGVSTVATKLGARNMTFVVSGVLLLNYLVSISIGIIWPQVFKSNIMILSHAILAFCLIFQTRELAKANYASAPSRQFFEFIWLLYYAEYFVYVFI

SEQ ID NO: 377 - protein, 539 aa, Artificial Sequence
  source: /note="Description of Artificial Sequence: Synthetic polypeptide"
MSKGEELFTGVVPILVELDGDVNGHKFSVSGEGEGDATYGKLTLKLICTTGKLPVPWPTLVTTLGYGLQCFARYPDHMKQHDFFKSAMPEGYVQERTIFFKDDGNYKTRAEVKFEGDTLVNRIELKGIDFKEDGNILGHKLEYNYNSHNVYITADKQKNGIKANFKIRHNIEDGGVQLADHYQQNTPIGDGPVLLPDNHYLSYQSALSKDPNEKRDHMVLLEFVTAAGITHGMDELYKKILNFGHTCWKLQRPYVVKGMISIACGLFGRELFNNRHLFSWGLMWKAFFALVPILSFNFFAAIMNQIYDVDIDRINKPDLPLVSGEMSIETAWILSIIVALTGLIVTIKLKSAPLFVFIYIFGIFAGFAYSVPPIRWKQYPFTNFLITISSHVGLAFTSYSATTSALGLPFVWRPAFSFIIAFMTVMGMTIAFAKDISDIEGDAKYGVSTVATKLGARNMTFVVSGVLLLNYLVSISIGIIWPQVFKSNIMILSHAILAFCLIFQTRELALANYASAPSRSFFEFIWLLYYAEYFVYVFI

SEQ ID NO: 378 - protein, 539 aa, Artificial Sequence
  source: /note="Description of Artificial Sequence: Synthetic polypeptide"
MSKGEELFTGVVPILVELDGDVNGHKFSVSGEGEGDATYGKLTLKLICTTGKLPVPWPTLVTTLGYGLQCFARYPDHMKQHDFFKSAMPEGYVQERTIFFKDDGNYKTRAEVKFEGDTLVNRIELKGIDFKEDGNILGHKLEYNYNSHNVYITADKQKNGIKANFKIRHNIEDGGVQLADHYQQNTPIGDGPVLLPDNHYLSYQSALSKDPNEKRDHMVLLEFVTAAGITHGMDELYKKILNFGHTCWKLQRPYVVKGMISIACGLFGRELFNNRHLFSWGLMWKAFFALVPILSFNFFAAIMNQIYDVDIDRINKPDLPLVSGEMSIETAWILSIIVALTGLIVTIKLKSAPLFVFIYIFGIFAGFAYSVPPIRWKQYPFTNFLITISSHVGLAFTSYSATTSALGLPFVWRPAFSFIIAFMTVMGMTIAFAKDISDIEGDAKYGVSTVATKLGARNMTFVVSGVLLLNYLVSISIGIIWPQVFKSNIMILSHAILAFCLIFQTRELALANYASAPSRQFFEFLWLLYYAEYFVYVFI

SEQ ID NO: 379 - protein, 539 aa, Artificial Sequence
  source: /note="Description of Artificial Sequence: Synthetic polypeptide"
MSKGEELFTGVVPILVELDGDVNGHKFSVSGEGEGDATYGKLTLKLICTTGKLPVPWPTLVTTLGYGLQCFARYPDHMKQHDFFKSAMPEGYVQERTIFFKDDGNYKTRAEVKFEGDTLVNRIELKGIDFKEDGNILGHKLEYNYNSHNVYITADKQKNGIKANFKIRHNIEDGGVQLADHYQQNTPIGDGPVLLPDNHYLSYQSALSKDPNEKRDHMVLLEFVTAAGITHGMDELYKKILNFGHTCWKLQRPYVVKGMISIACGLFGRELFNNRHLFSWGLMWKAFFALVPILSFNFFAAIMNQIYDVDIDRINKPDLPLVSGEMSIETAWILSIIVALTGLIVTIKLKSAPLFVFIYIFGIFAGFAYSVPPIRWKQYPFTNFLITISSHVGLAFTSYSATTSALGLPFVWRPAFSFIIAFMTVMGMTIAFAKDISDIEGDAKYGVSTVATKLGARNMTFVVSGVLLLNYLVSISIGIIWPQVFKSNIMILSHAILAFCLIFQTRELALANYASAPSRQFFEFIWILYYAEYFVYVFI

SEQ ID NO: 380 - protein, 539 aa, Artificial Sequence; identical to SEQ ID NO: 323
  source: /note="Description of Artificial Sequence: Synthetic polypeptide"

SEQ ID NO: 381 - protein, 539 aa, Artificial Sequence; identical to SEQ ID NO: 325
  source: /note="Description of Artificial Sequence: Synthetic polypeptide"

SEQ ID NO: 382 - protein, 539 aa, Artificial Sequence; identical to SEQ ID NO: 331
  source: /note="Description of Artificial Sequence: Synthetic polypeptide"

SEQ ID NO: 383 - protein, 539 aa, Artificial Sequence; identical to SEQ ID NO: 332
  source: /note="Description of Artificial Sequence: Synthetic polypeptide"

SEQ ID NO: 384 - protein, 539 aa, Artificial Sequence; identical to SEQ ID NO: 321
  source: /note="Description of Artificial Sequence: Synthetic polypeptide"

SEQ ID NO: 385 - protein, 539 aa, Artificial Sequence; identical to SEQ ID NO: 323
  source: /note="Description of Artificial Sequence: Synthetic polypeptide"

SEQ ID NO: 386 - protein, 539 aa, Artificial Sequence; identical to SEQ ID NO: 324
  source: /note="Description of Artificial Sequence: Synthetic polypeptide"

SEQ ID NO: 387 - protein, 539 aa, Artificial Sequence; identical to SEQ ID NO: 325
  source: /note="Description of Artificial Sequence: Synthetic polypeptide"

SEQ ID NO: 388 - protein, 539 aa, Artificial Sequence; identical to SEQ ID NO: 326
  source: /note="Description of Artificial Sequence: Synthetic polypeptide"

SEQ ID NO: 389 - protein, 539 aa, Artificial Sequence; identical to SEQ ID NO: 327
  source: /note="Description of Artificial Sequence: Synthetic polypeptide"

SEQ ID NO: 390 - protein, 539 aa, Artificial Sequence; identical to SEQ ID NO: 329
  source: /note="Description of Artificial Sequence: Synthetic polypeptide"

SEQ ID NO: 391 - protein, 539 aa, Artificial Sequence; identical to SEQ ID NO: 331
  source: /note="Description of Artificial Sequence: Synthetic polypeptide"

SEQ ID NO: 392 - protein, 539 aa, Artificial Sequence; identical to SEQ ID NO: 332
  source: /note="Description of Artificial Sequence: Synthetic polypeptide"

SEQ ID NO: 393 - protein, 539 aa, Artificial Sequence; identical to SEQ ID NO: 334
  source: /note="Description of Artificial Sequence: Synthetic polypeptide"

SEQ ID NO: 394 - protein, 539 aa, Artificial Sequence; identical to SEQ ID NO: 335
  source: /note="Description of Artificial Sequence: Synthetic polypeptide"

SEQ ID NO: 395 - protein, 539 aa, Artificial Sequence; identical to SEQ ID NO: 338
  source: /note="Description of Artificial Sequence: Synthetic polypeptide"

SEQ ID NO: 396 - protein, 539 aa, Artificial Sequence; identical to SEQ ID NO: 341
  source: /note="Description of Artificial Sequence: Synthetic polypeptide"

SEQ ID NO: 397 - protein, 539 aa, Artificial Sequence; identical to SEQ ID NO: 333
  source: /note="Description of Artificial Sequence: Synthetic polypeptide"

SEQ ID NO: 398 - protein, 539 aa, Artificial Sequence; identical to SEQ ID NO: 334
  source: /note="Description of Artificial Sequence: Synthetic polypeptide"

SEQ ID NO: 399 - protein, 539 aa, Artificial Sequence; identical to SEQ ID NO: 335
  source: /note="Description of Artificial Sequence: Synthetic polypeptide"

SEQ ID NO: 400 - protein, 539 aa, Artificial Sequence; identical to SEQ ID NO: 336
  source: /note="Description of Artificial Sequence: Synthetic polypeptide"

SEQ ID NO: 401 - protein, 539 aa, Artificial Sequence; identical to SEQ ID NO: 338
  source: /note="Description of Artificial Sequence: Synthetic polypeptide"

SEQ ID NO: 402 - protein, 539 aa, Artificial Sequence; identical to SEQ ID NO: 339
  source: /note="Description of Artificial Sequence: Synthetic polypeptide"

SEQ ID NO: 403 - protein, 539 aa, Artificial Sequence; identical to SEQ ID NO: 340
  source: /note="Description of Artificial Sequence: Synthetic polypeptide"

SEQ ID NO: 404 - protein, 539 aa, Artificial Sequence; identical to SEQ ID NO: 341
  source: /note="Description of Artificial Sequence: Synthetic polypeptide"

SEQ ID NO: 405 - protein, 539 aa, Artificial Sequence; identical to SEQ ID NO: 342
  source: /note="Description of Artificial Sequence: Synthetic polypeptide"

SEQ ID NO: 406 - protein, 539 aa, Artificial Sequence; identical to SEQ ID NO: 346
  source: /note="Description of Artificial Sequence: Synthetic polypeptide"

SEQ ID NO: 407 - protein, 539 aa, Artificial Sequence; identical to SEQ ID NO: 349
  source: /note="Description of Artificial Sequence: Synthetic polypeptide"

SEQ ID NO: 408 - protein, 539 aa, Artificial Sequence; identical to SEQ ID NO: 350
  source: /note="Description of Artificial Sequence: Synthetic polypeptide"

SEQ ID NO: 409 - protein, 539 aa, Artificial Sequence; identical to SEQ ID NO: 351
  source: /note="Description of Artificial Sequence: Synthetic polypeptide"

SEQ ID NO: 410 - protein, 539 aa, Artificial Sequence; identical to SEQ ID NO: 355
  source: /note="Description of Artificial Sequence: Synthetic polypeptide"

SEQ ID NO: 411 - protein, 539 aa, Artificial Sequence; identical to SEQ ID NO: 356
  source: /note="Description of Artificial Sequence: Synthetic polypeptide"

SEQ ID NO: 412 - protein, 539 aa, Artificial Sequence; identical to SEQ ID NO: 357
  source: /note="Description of Artificial Sequence: Synthetic polypeptide"

SEQ ID NO: 413 - protein, 539 aa, Artificial Sequence; identical to SEQ ID NO: 358
  source: /note="Description of Artificial Sequence: Synthetic polypeptide"

SEQ ID NO: 414 - protein, 539 aa, Artificial Sequence; identical to SEQ ID NO: 361
  source: /note="Description of Artificial Sequence: Synthetic polypeptide"

SEQ ID NO: 415 - protein, 539 aa, Artificial Sequence; identical to SEQ ID NO: 362
  source: /note="Description of Artificial Sequence: Synthetic polypeptide"

SEQ ID NO: 416 - protein, 539 aa, Artificial Sequence; identical to SEQ ID NO: 363
  source: /note="Description of Artificial Sequence: Synthetic polypeptide"

SEQ ID NO: 417 - protein, 539 aa, Artificial Sequence; identical to SEQ ID NO: 364
  source: /note="Description of Artificial Sequence: Synthetic polypeptide"

SEQ ID NO: 418 - protein, 539 aa, Artificial Sequence; identical to SEQ ID NO: 370
  source: /note="Description of Artificial Sequence: Synthetic polypeptide"

SEQ ID NO: 419 - protein, 539 aa, Artificial Sequence; identical to SEQ ID NO: 360
  source: /note="Description of Artificial Sequence: Synthetic polypeptide"

SEQ ID NO: 420 - protein, 539 aa, Artificial Sequence; identical to SEQ ID NO: 363
  source: /note="Description of Artificial Sequence: Synthetic polypeptide"

SEQ ID NO: 421 - protein, 539 aa, Artificial Sequence; identical to SEQ ID NO: 364
  source: /note="Description of Artificial Sequence: Synthetic polypeptide"

SEQ ID NO: 422 - protein, 539 aa, Artificial Sequence; identical to SEQ ID NO: 365
  source: /note="Description of Artificial Sequence: Synthetic polypeptide"

SEQ ID NO: 423 - protein, 539 aa, Artificial Sequence; identical to SEQ ID NO: 366
  source: /note="Description of Artificial Sequence: Synthetic polypeptide"

SEQ ID NO: 424 - protein, 539 aa, Artificial Sequence; identical to SEQ ID NO: 368
  source: /note="Description of Artificial Sequence: Synthetic polypeptide"

SEQ ID NO: 425 - protein, 539 aa, Artificial Sequence; identical to SEQ ID NO: 372
  source: /note="Description of Artificial Sequence: Synthetic polypeptide"

SEQ ID NO: 426 - protein, 539 aa, Artificial Sequence; identical to SEQ ID NO: 374
  source: /note="Description of Artificial Sequence: Synthetic polypeptide"

SEQ ID NO: 427 - protein, 539 aa, Artificial Sequence; identical to SEQ ID NO: 375
  source: /note="Description of Artificial Sequence: Synthetic polypeptide"

SEQ ID NO: 428 - protein, 539 aa, Artificial Sequence; identical to SEQ ID NO: 378
  source: /note="Description of Artificial Sequence: Synthetic polypeptide"

SEQ ID NO: 429 - protein, 539 aa, Artificial Sequence; identical to SEQ ID NO: 379
  source: /note="Description of Artificial Sequence: Synthetic polypeptide"

SEQ ID NO: 430 - protein, 4 aa, Artificial Sequence
  source: /note="Description of Artificial Sequence: Synthetic peptide"
VSTV

SEQ ID NO: 431 - protein, 4 aa, Artificial Sequence
  source: /note="Description of Artificial Sequence: Synthetic peptide"
ISTI

SEQ ID NO: 432 - protein, 8 aa, Artificial Sequence
  source: /note="Description of Artificial Sequence: Synthetic peptide"
VFKSNIMI

SEQ ID NO: 433 - protein, 8 aa, Artificial Sequence
  source: /note="Description of Artificial Sequence: Synthetic peptide"
LFKSNVMV

SEQ ID NO: 434 - protein, 251 aa, Cannabis sativa
MESVSSLFNIFSTIMVNYKSLVLALLSVSNLKYARGAYAPKDPWSTLTPSATYKGGITDYSSSFGIAIEAVATSASSVASSKAKRAASQIGDGQVQAATTTAAVSKKSTAAAVSQITDGQVQAAKSTAAAVSQITDGQVQAAKSTAAAVSQITDGQVQAAKSTAAAVSQITDGQVQAAKSTAAAASQISDGQVQATTSTKAAASQITDGQIQASKTTSGASQVSDGQVQATAEVKDANDPVDVVSCNNNST

SEQ ID NO: 435 - DNA, 9474 bp, Artificial Sequence
  source: /note="Description of Artificial Sequence: Synthetic polynucleotide"
aatattcaaacttcaatcgctaacccaagagaaaatttcttgaagtgtttctctcaatacattccaaataatgcaacaaatttgaaattggtttatactcaaaataatccattatacatgtctgttttaaattctacaattcataatttgagattttcttcagatactacaccaaaaccattggttattgttacaccatctcatgtttcacatatccaaggtactatcttgtgttctaagaaagttggtttgcaaattagaactagatcaggtggtcatgattcagaaggcatgtcttacatctcacaagttccattcgttatcgttgatttgagaaacatgagatcaattaaaattgatgttcattcacaaacagcttgggttgaagctggtgcaactttgggtgaagtttactactgggttaacgaaaagaatgaatctttatcattggctgctggttactgtccaacagtttgtgctggtggtcattttggtggtggtggttatggtccattaatgagatcctatggtttggctgctgataacatcatcgatgcacatttggttaacgttcatggtaaagttttggatagaaagtctatgggtgaagatttgttttgggctttgagaggtggtggtgctgaatcatttggtatcatcgttgcttggaagatcagattggttgcagttccaaaatctactatgttctcagttaagaaaattatggaaatccatgaattagttaaattggttaataagtggcaaaatattgcttataaatacgataaagatttgttattgatgactcattttattacaagaaatattactgataaccaaggtaaaaataagacagctatccatacttacttttcttcagttttcttgggtggtgttgattctttggttgatttgatgaataagtcttttccagaattaggtattaagaaaactgattgtagacaattgtcttggatcgatactatcattttctattcaggtgttgttaactacgatacagataacttcaataaggaaattttattggatagatcagctggtcaaaatggtgcttttaaaattaaattggattacgttaagaaaccaattccagaatcagttttcgttcaaattttagaaaaattgtatgaagaagatattggtgctggcatgtacgcattgtatccatacggtggtatcatggatgaaatttctgaatcagctattccatttccacatagagcaggtattttatacgaattgtggtacatttgttcttgggaaaagcaagaagataacgaaaaacatttgaactggattagaaacatctataacttcatgactccatacgtttcacaaaacccaagattggcttatttgaactacagagatttggatatcggtattaatgatcctaaaaatccaaacaactatacacaagcaagaatttggggtgaaaagtacttcggtaaaaatttcgatagattggttaaggttaaaactttggttgatccaaataatttctttagaaatgaacaatctattccaccattgccaagacatagacattgataagattaatataattatataaaaatattatcttcttttctttatatctagtgttatgtaaaataaattgatgactacggaaagcttttttatattgtttctttttcattctgagccacttaaatttcgtgaatgttcttgtaagggacggtagatttacaagtgatacaacaaaaagcaaggcgctttttctaataaaaagaagaaaagcatttaacaattgaacacctctatatcaacgaagaatattactttgtctctaaatccttgtaaaatgtgtacgatctctatatgggttactcagaagtgtaccgaagactgcattgaaagtttatgttttttcactgcaagcgtcattttcgcgttgagaagaatttcatcattttttttttattcttttttttgatttcggtttccttgaaatttttttgattcggtaatctccgaacagaaggaagaacgaaggaaggagcacagacttagattggtatatatacgcatatgtagtgttgaagaaacatgaaattgcccagtattcttaacccaactgcacagaacaaaaacctgcaggaaacgaagataaatcatgtcgaaagctacatataaggaacgtgctgctactcatcctagtcctgttgctgccaagctatttaatatcatgcacgaaaagcaaacaaacttgtgtgcttcattggatgttcgtaccaccaaggaattactggagttagttgaagcattaggtcccaaaatttgtttactaaaaacacatgtggatatcttgactgatttttccatggagggcacagttaagccgctaaaggcattatccgccaagtacaattttttactcttcgaagacagaaaatttgctgacattggtaatacagtcaaattgcagtactctgcgggtgtatacagaatagcagaatgggcagacattacgaatgcacacggtgtggtgggcccaggtattgttagcggtttgaagcaggcggcagaagaagtaacaaaggaacctagaggccttttgatgttagcagaattgtcatgcaagggctccctatctactggagaatatactaagggtactgttgacattgcgaagagcgacaaagattttgttatcggctttattgctcaaagagacatgggtggaagagatgaaggttacgattggttgattatgacacccggtgtgggtttagatgacaagggagacgcattgggtcaacagtatagaaccgtggatgatgtggtctctacaggatctgacattattattgttggaagaggactatttgcaaagggaagggatgctaaggtagagggtgaacgttacagaaaagcaggctgggaagcatatttgagaagatgcggccagcaaaactaaaaaactgtattataagtaaatgcatgtatactaaactcacaaattagagcttcaatttaattatatcagttattacccaatcagatctgctgcattaatgaatcggccaacgcgcggggagaggcggtttgcgtattgggcgctcttccgcttcctcgctcactgactcgctgcgctcggtcgttcggctgcggcgagcggtatcagcatcgatgaattccacggactatagactatactagtatactccgtctactgtacgatacacttccgctcaggtccttgtcctttaacgaggccttaccactcttttgttactctattgatccagctcagcaaaggcagtgtgatctaagattctatcttcgcgatgtagtaaaactagctagaccgagaaagagactagaaatgcaaaaggcacttctacaatggctgccatcattattatccgatgtgacgctgcagcttctcaatgatattcgaatacgctttgaggagatacagcctaatatccgacaaactgttttacagatttacgatcgtatttgttacccatcattgaattttgaacatccgaacctgggagttttccctgaaacagatagtatatttgaacctgtataataatatatagtctagcgctttacggaagacaatgtatgtatttcggttcctggagaaactattgcatctattgcataggtaatcttgcacgtcgcatccccggttcattttctgcgtttccatcttgcacttcaatagcatatctttgttaacgaagcatctgtgcttcattttgtagaacaaaaatgcaacgcgagagcgctaatttttcaaacaaagaatctgagctgcatttttacagaacagaaatgcaacgcgaaagcgctattttaccaacgaagaatctgtgcttcatttttgtaaaacaaaaatgcaacgcgagagcgctaatttttcaaacaaagaatctgagctgcatttttacagaacagaaatgcaacgcgagagcgctattttaccaacaaagaatctatacttcttttttgttctacaaaaatgcatcccgagagcgctatttttctaacaaagcatcttagattactttttttctcctttgtgcgctctataatgcagtctcttgataactttttgcactgtaggtccgttaaggttagaagaaggctactttggtgtctattttctcttccataaaaaaagcctgactccacttcccgcgtttactgattactagcgaagctgcgggtgcattttttcaagataaaggcatccccgattatattctataccgatgtggattgcgcatactttgtgaacagaaagtgatagcgttgatgattcttcattggtcagaaaattatgaacggtttcttctattttgtctctatatactacgtataggaaatgtttacattttcgtattgttttcgattcactctatgaatagttcttactacaatttttttgtctaaagagtaatactagagataaacataaaaaatgtagaggtcgagtttagatgcaagttcaaggagcgaaaggtggatgggtaggttatatagggatatagcacagagatatatagcaaagagatacttttgagcaatgtttgtggaagcggtattcgcaatattttagtagctcgttacagtccggtgcgtttttggttttttgaaagtgcgtcttcagagcgcttttggttttcaaaagcgctctgaagttcctatactttctagagaataggaacttcggaataggaacttcaaagcgtttccgaaaacgagcgcttccgaaaatgcaacgcgagctgcgcacatacagctcactgttcacgtcgcacctatatctgcgtgttgcctgtatatatatatacatgagaagaacggcatagtgcgtgtttatgcttaaatgcgtacttatatgcgtctatttatgtaggatgaaaggtagtctagtacctcctgtgatattatcccattccatgcggggtatcgtatgcttccttcagcactaccctttagctgttctatatgctgccactcctcaattggattagtctcatccttcaatgctatcatttcctttgatattggatcatatgcatagtaccgagaaactagtgcgaagtagtgatcaggtattgctgttatctgatgagtatacgttgtcctggccacggcagaagcacgcttatcgctccaatttcccacaacattagtcaactccgttaggcccttcattgaaagaaatgaggtcatcaaatgtcttccaatgtgagattttgggccattttttatagcaaagattgaataaggcgcatttttcttcaaagctttattgtacgatctgactaagttatcttttaataattggtattcctgtttattgcttgaagaattgccggtcctatttactcgttttaggactggttcagaattcatcgatgctcactcaaaggcggtaatacggttatccacagaatcaggggataacgcaggaaagaacatgtgagcaaaaggccagcaaaaggccaggaaccgtaaaaaggccgcgttgctggcgtttttccataggctccgcccccctgacgagcatcacaaaaatcgacgctcaagtcagaggtggcgaaacccgacaggactataaagataccaggcgtttccccctggaagctccctcgtgcgctctcctgttccgaccctgccgcttaccggatacctgtccgcctttctcccttcgggaagcgtggcgctttctcatagctcacgctgtaggtatctcagttcggtgtaggtcgttcgctccaagctgggctgtgtgcacgaaccccccgttcagcccgaccgctgcgccttatccggtaactatcgtcttgagtccaacccggtaagacacgacttatcgccactggcagcagccactggtaacaggattagcagagcgaggtatgtaggcggtgctacagagttcttgaagtggtggcctaactacggctacactagaagaacagtatttggtatctgcgctctgctgaagccagttaccttcggaaaaagagttggtagctcttgatccggcaaacaaaccaccgctggtagcggtggtttttttgtttgcaagcagcagattacgcgcagaaaaaaaggatctcaagaagatcctttgatcttttctacggggtctgacgctcagtggaacgaaaactcacgttaagggattttggtcatgagattatcaaaaaggatcttcacctagatccttttaaattaaaaatgaagttttaaatcaatctaaagtatatatgagtaaacttggtctgacagttaccaatgcttaatcagtgaggcacctatctcagcgatctgtctatttcgttcatccatagttgcctgactccccgtcgtgtagataactacgatacgggagggcttaccatctggccccagtgctgcaatgataccgcgagacccacgctcaccggctccagatttatcagcaataaaccagccagccggaagggccgagcgcagaagtggtcctgcaactttatccgcctccatccagtctattaattgttgccgggaagctagagtaagtagttcgccagttaatagtttgcgcaacgttgttgccattgctacaggcatcgtggtgtcacgctcgtcgtttggtatggcttcattcagctccggttcccaacgatcaaggcgagttacatgatcccccatgttgtgcaaaaaagcggttagctccttcggtcctccgatcgttgtcagaagtaagttggccgcagtgttatcactcatggttatggcagcactgcataattctcttactgtcatgccatccgtaagatgcttttctgtgactggtgagtactcaaccaagtcattctgagaatagtgtatgcggcgaccgagttgctcttgcccggcgtcaatacgggataataccgcgccacatagcagaactttaaaagtgctcatcattggaaaacgttcttcggggcgaaaactctcaaggatcttaccgctgttgagatccagttcgatgtaacccactcgtgcacccaactgatcttcagcatcttttactttcaccagcgtttctgggtgagcaaaaacaggaaggcaaaatgccgcaaaaaagggaataagggcgacacggaaatgttgaatactcatactcttcctttttcaatattattgaagcatttatcagggttattgtctcatgagcggatacatatttgaatgtatttagaaaaataaacaaataggggttccgcgcacatttccccgaaaagtgccacctgacgtctaagaaaccattattatcatgacattaacctataaaaataggcgtatcacgaggccctttcgtctcgcgcgtttcggtgatgacggtgaaaacctctgacacatgcagctcccggagacggtcacagcttgtctgtaagcggatgccgggagcagacaagcccgtcagggcgcgtcagcgggtgttggcgggtgtcggggctggcttaactatgcggcatcagagcagattgtactgagagtgcaccatatgcggtgtgaaataccgcacagatgcgtaaggagaaaataccgcatcaggcgccattcgccattcaggctgcgcaactgttgggaagggcgatcggtgcgggcctcttcgctattacgccagctggcgaaagggggatgtgctgcaaggcgattaagttgggtaacgccagggttttcccagtcacgacgttgtaaaacgacggccagtgaattgcggccgcatcgatggaaaagaccaaacggtgacgttaagagaaagaaattctatgaggcaagtaagaggcactattactgatgtgatttcgaccattgacaaaatgcttcacaaccctgatgaatcggactgggataaatcaacatttggactgtcgcctgttaagatataactgaaaaaagaggggaatttttagatactgaaatgatattttagaataaccagactatatataaggataaattacaaaaaattaactaatagataagatttaaatataaaagatatgcaactagaaaagtcttatcaatctccttatattgaattttcaaaaattcttactttttttttggatggacgcaaagaagtttaataatcatattacatggcattaccaccatatacatatccatatctaatcttacttatatgttgtggaaatgtaaagagccccattatcttagcctaaaaaaaccttctctttggaactttcagtaatacgcttaactgctcattgctatattgaagtacggattagaagccgccgagcgggcgacagccctccgacggaagactctcctccgtgcgtcctcgtcttcaccggtcgcgttcctgaaacgcagatgtgcctcgcgccgcactgctccgaacaataaagattctacaatactagcttttatggttatgaagaggaaaaattggcagtaacctggccccacaaaccttcaaattaacgaatcaaattaacaaccataggatgataatgcgattagttttttagccttatttctggggtaattaatcagcgaagcgatgatttttgatctattaacagatatataaatggaaaagctgcataaccactttaactaatactttcaacattttcagtttgtattacttcttattcaaatgtcataaaagtatcaacaaaaaattgttaatatacctctatactttaacgtcaaggagaaaaaactataatgcaatataaaaagccattagtcgtctccgctttagctgctacatctttagctgcctatgctccaaaggacccgtggtccactttaactccatcagctacttacaagggtggtataacagattactcttcgagtttcggtattgctattgaagccgtggctaccagtgcttcctccgtcgcctcatctaaagcaaagagagccgcctctcagataggtgatggtcaagtacaggctgccactactactgctgctgtttctaagaaatccaccgctgctgctgtttctcaaataactgacggtcaagttcaagctgctaagtctactgccgctgctgtttcccaaataactgacggtcaagttcaagctgctaagtctactgccgctgccgtttctcaaataactgacggtcaagttcaagctgctaagtctactgccgctgccgtttctcaaataactgatggtcaagttcaagctgccaagtctactgctgccgctgcctctcagatttctgacggccaagttcaggccactacctctactaaggctgctgcatcccaaattacagatgggcagatacaagcatctaaaactaccagtggcgctagtcaagtaagtgatggccaagtccaggctactgctgaagtgaaagacgctaacgatccagtcgatgttgtttcctgtaataacaatagtaccttggagaaaagagaggctgaagca

1. A genetically modified microorganism comprising at least three polynucleotides that encode for:
a) an amino acid sequence that is substantially identical, at least about 75% identical, at least about 80% identical, at least about 85% identical, at least about 90% identical, at least about 91% identical, at least about 92% identical, at least about 93% identical, at least about 94% identical, at least about 95% identical, at least about 96% identical, at least about 97% identical, at least about 98% identical, or at least about 99% identical to SEQ ID NO: 27;
b) an amino acid sequence that is substantially identical, at least about 75% identical, at least about 80% identical, at least about 85% identical, at least about 90% identical, at least about 91% identical, at least about 92% identical, at least about 93% identical, at least about 94% identical, at least about 95% identical, at least about 96% identical, at least about 97% identical, at least about 98% identical, or at least about 99% identical to SEQ ID NO: 32; or
c) combinations thereof.

2. The genetically modified microorganism of claim 1 comprising:
a polynucleotide that encodes for an amino acid sequence that is substantially identical, at least about 75% identical, at least about 80% identical, at least about 85% identical, at least about 90% identical, at least about 91% identical, at least about 92% identical, at least about 93% identical, at least about 94% identical, at least about 95% identical, at least about 96% identical, at least about 97% identical, at least about 98% identical, or at least about 99% identical to SEQ ID NO: 27.

3. The genetically modified microorganism of claim 1 or claim 2 comprising:
a polynucleotide that encodes for an amino acid sequence that is substantially identical, at least about 75% identical, at least about 80% identical, at least about 85% identical, at least about 90% identical, at least about 91% identical, at least about 92% identical, at least about 93% identical, at least about 94% identical, at least about 95% identical, at least about 96% identical, at least about 97% identical, at least about 98% identical, or at least about 99% identical to SEQ ID NO: 32.

4. The genetically modified microorganism of any one of claims 1 to 3 comprising:
at least two polynucleotides that encode for an amino acid sequence that is substantially identical, at least about 75% identical, at least about 80% identical, at least about 85% identical, at least about 90% identical, at least about 91% identical, at least about 92% identical, at least about 93% identical, at least about 94% identical, at least about 95% identical, at least about 96% identical, at least about 97% identical, at least about 98% identical, or at least about 99% identical to SEQ ID NO: 32.

5. The genetically modified microorganism of any one of claims 1 to 4, wherein the at least three polynucleotides encode for proteins having prenyltransferase activity.

6. The genetically modified microorganism of any one of claims 1 to 5, wherein the microorganism comprises at least one polynucleotide that encodes a F96W mutant of Saccharomyces cerevisiae ERG20.

7. The genetically modified microorganism of any one of claims 1 to 6, wherein the microorganism comprises at least one polynucleotide that encodes an N127W mutant of Saccharomyces cerevisiae ERG20.

8. The genetically modified microorganism of any one of claims 1 to 7, wherein at least one of the microorganism's engodenous genes is disrupted; preferably wherein the engodenous genes is deleted.

9. The genetically modified microorganism of any one of claims 1 to 8, wherein the microorganism further comprises the polynucleotide sequence of the Saccharomyces cerevisiae GAL1/GAL10 promoter.

10. The genetically modified microorganism of claim 9, wherein the GAL1/GAL10 promoter is inserted into the microorganism's native LPP1 locus.

11. The genetically modified microorganism of claim 10, wherein the microorganism's native LPP1 open reading frame is deleted.

12. The genetically modified microorganism of any one of claims 1 to 11, wherein the microorganism further comprises at least one polynucleotide that encodes for an amino acid sequence that is substantially identical to a truncated amino acid sequence of the Saccharomyces cerevisiae HMG1, wherein the first 530 amino acids of the HMG1 are truncated.

13. The genetically modified microorganism of any one of claims 1 to 12, further comprising at least one polynucleotide encoding at least one polypeptide with acyl activating activity; polyketide synthase activity; olivetol synthase activity; tetraketide synthase activity; olivetolic acid cyclase activity; THCA synthase activity; CBDA synthase activity; CBCA synthase activity; HMG-Co reductase activity; farnesyl pyrophosphate synthetase activity; or any combination thereof.

14. The genetically modified microorganism of any one of claims 1 to 13, further comprising at least one polynucleotide encoding an acyl activating enzyme (AAE1); a polyketide synthase (PKS), such as a tetraketide synthase (TKS); an olivetolic acid cyclase (OAC); a THCA synthase (THCAS); a CBDA synthase (CBDAS); a CBCA synthase (CBCAS); a HMG-Co reductase (HMG1); a farnesyl pyrophosphate synthetase (ERG20); or any combination thereof;
preferably wherein the AAE1 is substantially identical, at least about 75% identical, at least about 80% identical, at least about 85% identical, at least about 90% identical, at least about 91% identical, at least about 92% identical, at least about 93% identical, at least about 94% identical, at least about 95% identical, at least about 96% identical, at least about 97% identical, at least about 98% identical, or at least about 99% identical to SEQ ID NO: 14;
preferably wherein the TKS is substantially identical, at least about 75% identical, at least about 80% identical, at least about 85% identical, at least about 90% identical, at least about 91% identical, at least about 92% identical, at least about 93% identical, at least about 94% identical, at least about 95% identical, at least about 96% identical, at least about 97% identical, at least about 98% identical, or at least about 99% identical to SEQ ID NO: 41.
preferably wherein the OAC is substantially identical, at least about 75% identical, at least about 80% identical, at least about 85% identical, at least about 90% identical, at least about 91% identical, at least about 92% identical, at least about 93% identical, at least about 94% identical, at least about 95% identical, at least about 96% identical, at least about 97% identical, at least about 98% identical, or at least about 99% identical to SEQ ID NO: 8;
preferably wherein the THCAS is substantially identical, at least about 75% identical, at least about 80% identical, at least about 85% identical, at least about 90% identical, at least about 91% identical, at least about 92% identical, at least about 93% identical, at least about 94% identical, at least about 95% identical, at least about 96% identical, at least about 97% identical, at least about 98% identical, or at least about 99% identical to a sequence chosen from SEQ ID NO: 10 or SEQ ID NO: 120;
preferably wherein the THCAS is a T446A mutant of SEQ ID NO: 120, a T446V mutant of SEQ ID NO: 120, or a T446I mutant of SEQ ID NO: 120, or a combination thereof;
preferably wherein the polynucleotide encodes a THCAS signal sequence substantially identical to, at least about 75% identical, at least about 80% identical, at least about 85% identical, at least about 90% identical, at least about 91% identical, at least about 92% identical, at least about 93% identical, at least about 94% identical, at least about 95% identical, at least about 96% identical, at least about 97% identical, at least about 98% identical, or at least about 99% identical to a sequence chosen from SEQ ID NO: 121 to SEQ ID NO: 138;
preferably wherein the CBDAS is substantially identical, at least about 75% identical, at least about 80% identical, at least about 85% identical, at least about 90% identical, at least about 91% identical, at least about 92% identical, at least about 93% identical, at least about 94% identical, at least about 95% identical, at least about 96% identical, at least about 97% identical, at least about 98% identical, or at least about 99% identical to SEQ ID NO: 12;
preferably wherein the CBCAS is substantially identical, at least about 75% identical, at least about 80% identical, at least about 85% identical, at least about 90% identical, at least about 91% identical, at least about 92% identical, at least about 93% identical, at least about 94% identical, at least about 95% identical, at least about 96% identical, at least about 97% identical, at least about 98% identical, or at least about 99% identical to SEQ ID NO: 18;
preferably wherein the HMG1 is substantially identical, at least about 75% identical, at least about 80% identical, at least about 85% identical, at least about 90% identical, at least about 91% identical, at least about 92% identical, at least about 93% identical, at least about 94% identical, at least about 95% identical, at least about 96% identical, at least about 97% identical, at least about 98% identical, or at least about 99% identical to SEQ ID NO: 20 or SEQ ID NO: 22;
preferably wherein the ERG20 is substantially identical, at least about 75% identical, at least about 80% identical, at least about 85% identical, at least about 90% identical, at least about 91% identical, at least about 92% identical, at least about 93% identical, at least about 94% identical, at least about 95% identical, at least about 96% identical, at least about 97% identical, at least about 98% identical, or at least about 99% identical to SEQ ID NO: 24.

15. The genetically modified microorganism of any one of claims 1 to 14, further comprising at least one polynucleotide encoding an enzyme that is capable of converting olivetolic acid to cannabigerolic acid (“CBGA”).

16. The genetically modified microorganism of any one of claims 1 to 15, further comprising at least one polynucleotide encoding an enzyme that is capable of converting butyric acid to cannabigerolic acid (“CBGVA”).

17. The genetically modified microorganism of any one of claims 1 to 16, further comprising a polynucleotide that encodes for an amino acid sequence that is substantially identical to, at least about 75% identical, at least about 80% identical, at least about 85% identical, at least about 90% identical, at least about 91% identical, at least about 92% identical, at least about 93% identical, at least about 94% identical, at least about 95% identical, at least about 96% identical, at least about 97% identical, at least about 98% identical, or at least about 99% identical to SEQ ID NO: 5.

18. The genetically modified microorganism of any one of claims 1 to 17, further comprising a polynucleotide that is substantially identical to, at least about 75% identical, at least about 80% identical, at least about 85% identical, at least about 90% identical, at least about 91% identical, at least about 92% identical, at least about 93% identical, at least about 94% identical, at least about 95% identical, at least about 96% identical, at least about 97% identical, at least about 98% identical, or at least about 99% identical to SEQ ID NO: 6.

19. The genetically modified microorganism of any one of claims 1 to 18, further comprising a polynucleotide that encodes for an amino acid sequence that is substantially identical to, at least about 75% identical, at least about 80% identical, at least about 85% identical, at least about 90% identical, at least about 91% identical, at least about 92% identical, at least about 93% identical, at least about 94% identical, at least about 95% identical, at least about 96% identical, at least about 97% identical, at least about 98% identical, or at least about 99% identical to SEQ ID NO: 7.

20. The genetically modified microorganism of any one of claims 1 to 19, further comprising a polynucleotide that is substantially identical to, at least about 75% identical, at least about 80% identical, at least about 85% identical, at least about 90% identical, at least about 91% identical, at least about 92% identical, at least about 93% identical, at least about 94% identical, at least about 95% identical, at least about 96% identical, at least about 97% identical, at least about 98% identical, or at least about 99% identical to SEQ ID NO:8.

21. The genetically modified microorganism of any one of claims 1 to 20, further comprising a polynucleotide that encodes for an amino acid sequence that is substantially identical to, at least about 75% identical, at least about 80% identical, at least about 85% identical, at least about 90% identical, at least about 91% identical, at least about 92% identical, at least about 93% identical, at least about 94% identical, at least about 95% identical, at least about 96% identical, at least about 97% identical, at least about 98% identical, or at least about 99% identical to SEQ ID NO: 13.

22. The genetically modified microorganism of any one of claims 1 to 21, further comprising a polynucleotide that is substantially identical to, at least about 75% identical, at least about 80% identical, at least about 85% identical, at least about 90% identical, at least about 91% identical, at least about 92% identical, at least about 93% identical, at least about 94% identical, at least about 95% identical, at least about 96% identical, at least about 97% identical, at least about 98% identical, or at least about 99% identical to SEQ ID NO:14.

23. The genetically modified microorganism of any one of claims 1 to 22, wherein said microorganism comprises at least two polynucleotides encoding a protein with AAE1 activity.

24. The genetically modified microorganism of any one of claims 1 to 23, wherein said microorganism comprises at least three polynucleotides encoding a protein with AAE1 activity.

25. The genetically modified microorganism of any one of claims 1 to 24, wherein said microorganism comprises at least two polynucleotides encoding a protein with TKS activity.

26. The genetically modified microorganism of any one of claims 1 to 25, wherein said microorganism comprises at least three polynucleotides encoding a protein with TKS activity.

27. The genetically modified microorganism of any one of claims 1 to 26, wherein said microorganism comprises at least two polynucleotides encoding a protein with OAC activity.

28. The genetically modified microorganism of any one of claims 1 to 27, wherein said microorganism comprises at least three polynucleotides encoding a protein with OAC activity.

29. The genetically modified microorganism of any one of claims 1 to 28, wherein said microorganism comprises at least three polynucleotides encoding a protein with AAE1 activity; at least three polynucleotides encoding a protein with TKS activity; and at least three polynucleotides encoding a protein with OAC activity.

30. The genetically modified microorganism of any one of claims 1 to 29, further comprising one or more polynucleotides encoding proteins with Hydroxymethylglutaryl-CoA synthase activity; Hydroxymethylglutaryl-CoA reductase activity; tHMG1 activity; Acetyl-CoA C-acetyltransferase activity; or any combination thereof.

31. The genetically modified microorganism of any one of claims 1 to 30, further comprising one or more polynucleotides encoding a Hydroxymethylglutaryl-CoA synthase (ERG13); a Hydroxymethylglutaryl-CoA reductase (HMG1); a tHMG1; a Acetyl-CoA C-acetyltransferase (ERG10); or any combination thereof.

32. The genetically modified microorganism of any one of claims 1 to 31, further comprising a polynucleotide encoding an ERG13; a polynucleotide encoding a HGM1 and a polynucleotide encoding an amino acid sequence that is substantially identical to, at least about 75% identical, at least about 80% identical, at least about 85% identical, at least about 90% identical, at least about 91% identical, at least about 92% identical, at least about 93% identical, at least about 94% identical, at least about 95% identical, at least about 96% identical, at least about 97% identical, at least about 98% identical, or at least about 99% identical SEQ ID NO: 32.

33. The genetically modified microorganism of any one of claims 1 to 31, further comprising a polynucleotide encoding a tHMG1; a polynucleotide encoding an ERG10 and a polynucleotide encoding an EGR13.

34. The genetically modified microorganism of any one of claims 1 to 31, further comprising a polynucleotide encoding a tHMG1; a polynucleotide encoding an ERG13 and a polynucleotide encoding an AAE1.

35. The genetically modified microorganism of any one of claims 1 to 22, further comprising a polynucleotide encoding an enzyme with CBDA synthase activity, a polynucleotide encoding an enzyme with CBCA synthase, a polynucleotide encoding an enzyme with CBCA and CBDA synthase activity, or a combination thereof,
preferably wherein the the enzyme with CBDA synthase activity is substantially identical to, at least about 75% identical, at least about 80% identical, at least about 85% identical, at least about 90% identical, at least about 91% identical, at least about 92% identical, at least about 93% identical, at least about 94% identical, at least about 95% identical, at least about 96% identical, at least about 97% identical, at least about 98% identical, or at least about 99% identical to a sequence chosen from SEQ ID NO; 43 or SEQ ID NO: 153 to SEQ ID NO: 287;
preferably wherein the polynucleotide encodes a CBDA synthase signal sequence substantially identical to, at least about 75% identical, at least about 80% identical, at least about 85% identical, at least about 90% identical, at least about 91% identical, at least about 92% identical, at least about 93% identical, at least about 94% identical, at least about 95% identical, at least about 96% identical, at least about 97% identical, at least about 98% identical, or at least about 99% identical to a sequence chosen from SEQ ID NO: 44 to SEQ ID NO: 73 or SEQ ID NO: 104 to SEQ ID NO: 110,
preferably wherein the enzyme with CBCA synthase activity is substantially identical to, at least about 75% identical, at least about 80% identical, at least about 85% identical, at least about 90% identical, at least about 91% identical, at least about 92% identical, at least about 93% identical, at least about 94% identical, at least about 95% identical, at least about 96% identical, at least about 97% identical, at least about 98% identical, or at least about 99% identical to a sequence chosen from SEQ ID NO: 288 to SEQ ID NO: 297 or SEQ ID NO: 305 to SEQ ID NO: 318.

36. The genetically modified microorganism of any one of claims 1 to 22 and 35, further comprising the bCBGA1854 plasmid of SEQ ID No.: 435.

37. The genetically modified microorganism of any one of claims 1 to 22 and 35 to 36, further comprising a polynucleotiode encoding a protein with PKS activity, a polynucleotiode encoding a protein with OAC activity, and a polynucleotiode encoding a protein with AAE1 activity.

38. The genetically modified microorganism of any one of claims 1 to 22 and 35 to 37, further comprising a polynucleotide encoding a PIR3-CBDA of SEQ ID NO: 302.

39. The genetically modified microorganism of any one of claims 1 to 22 and 35 to 38, further comprising a signal peptide corresponding to 0253/asn053-2.

40. The genetically modified microorganism of any one of claims 1 to 22, wherein the microorganism's engodenous VPS10 gene is disrupted; preferably wherein the sequence of the disrupted gene is SEQ ID NO: 300.

41. The genetically modified microorganism of any one of claims 1 to 23 and 40, wherein the coding sequence of the microorganism's engodenous VPS10 gene is deleted.

42. The genetically modified microorganism of any one of claims 1 to 41, wherein said microorganism is capable of producing cannabigerolic acid.

43. The genetically modified microorganism of any one of claims 1 to 42, wherein said microorganism is capable of producing a cannabinoid.

44. The genetically modified microorganism of claim 43, wherein said cannabinoid is selected from Δ9-tetrahydrocannabinolic acid (THCA), cannabidiolic acid (CBDA), cannabichromenic acid (CBCA), Δ9-tetrahydrocannabinol (THC), cannabidiol (CBD), cannabichromene (CBC), Δ⁹-tetrahydrocannabivarinic acid (THCVA), cannabidivarinic acid (CBDVA), cannabichromevarinic acid (CBCVA), or any combination thereof.

45. The genetically modified microorganism of claim 8, wherein said one or more endogenous genes is from a pathway that controls beta oxidation of long chain fatty acids.

46. The genetically modified microorganism of claim 45, wherein said at least one endogenous gene is FOX1, FAA1, FAA4, FAT1, PXA1, PXA2, and/or PEX11.

47. The genetically modified microorganism of claim 45 or 46, wherein said at least one endogenous gene is FOX1.

48. The genetically modified microorganism of any one of claims 45 to 47, wherein said one or more gene is disrupted using a CRISPR/Cas system.

49. The genetically modified microorganism of any one of claims 1 to 48, wherein said microorganism is a bacterium or a yeast.

50. The genetically modified microorganism of any one of claims 1 to 49, wherein said microorganism is a yeast.

51. The genetically modified microorganism of claim 50, wherein said yeast is from the genus Saccharomyces.

52. The genetically modified microorganism of claim 51, wherein said yeast is from the species Saccharomyces cerevisiae.

53. A genetically modified microorganism comprising:
at least two polynucleotides that encode for amino acid sequences that are substantially identical, at least about 75% identical, at least about 80% identical, at least about 85% identical, at least about 90% identical, at least about 91% identical, at least about 92% identical, at least about 93% identical, at least about 94% identical, at least about 95% identical, at least about 96% identical, at least about 97% identical, at least about 98% identical, or at least about 99% identical to SEQ ID NO: 27, SEQ ID NO: 32, or combinations thereof,
at least three polynucleotides that encode for a protein with acyl activating activity;
at least three polynucleotides that encode for a protein with polyketide synthase activity;
at least three polynucleotides that encode for a protein with olivetolic acid cyclase activity.

54. A genetically modified microorganism comprising a polynucleotide that encodes for a Saccharomyces cerevisiae TKS with a mutation at Ala125.

55. The genetically modified microorganism of claim 54, wherein the mutation is Ala125Ser.

56. A method of producing CBGA comprising:
(a) contacting a carbon substrate with the genetically modified microorganism of any one of claims 1 to 55;
(b) growing said genetically modified microorganism to produce CBGA.

57. The method of claim 56, further comprising (c) isolating said CBGA from the genetically modified organism.

58. The method of claim 56 or 57, wherein said carbon substrate is a sugar, alcohol, and/or fatty acid.

59. The method of any one of claims 56 to 58, wherein said carbon substrate is selected from hexanoic acid, glucose, fructose, xylose, sucrose, dextrins, starch, xylan, cellulose, hemicellulose, arabinose, glycerol, ethanol, butanol, methanol, or any combination thereof.

60. The method of any one of claims 56 to 59, wherein said carbon substrate is hexanoic acid.

61. The method of any one of claims 56 to 60, wherein said CBGA is converted to Δ⁹-tetrahydrocannabinol (THC), cannabidiol (CBD), cannabichromene (CBC), or any combination thereof.

62. The method of claim 61, wherein said CBGA conversion is completed outside the microorganism.

63. The method of claim 61 or 62, wherein said conversion is a non-enzymatic conversion.

64. The method of any one of claims 61 to 63, wherein said conversion is an enzymatic conversion.

65. A method of producing CBGVA comprising:
(a) contacting a carbon substrate with the genetically modified microorganism of any one of claims 1 to 55;
(b) growing said genetically modified microorganism to produce CBGVA.

66. The method of claim 65, further comprising (c) isolating said CBGVA from the genetically modified organism.

67. The method of claim 65 or 66, wherein said carbon substrate is a fatty acid.

68. The method of any one of claims 65 to 67, wherein said carbon substrate is butyric acid.

69. The method of any one of claims 65 to 68, wherein said CBGVA is converted to Δ⁹-tetrahydrocannabivarinic acid (THCVA), cannabidivarinic acid (CBDVA), cannabichromevarinic acid (CBCVA), or any combination thereof.

70. The method of claim 69, wherein said CBGA conversion is completed outside the microorganism.

71. The method of claim 69 or 70, wherein said conversion is a non-enzymatic conversion.

72. The method of any one of claims 69 to 71, wherein said conversion is an enzymatic conversion.

73. A method of producing a cannabinoid comprising:
(a) contacting a carbon substrate with the genetically modified microorganism of any one of claims 1 to 55;
(b) growing said genetically modified microorganism to producing a cannabinoid.

74. The method of claim 73, further comprising (c) isolating said cannabinoid from the genetically modified organism.

75. The method of claim 73 or 74, wherein said carbon substrate is selected from a sugar, alcohol, and/or fatty acid.

76. The method of any one of claims 73 to 75, wherein said carbon substrate is selected from hexanoic acid, butyric acid, glucose, fructose, xylose, sucrose, dextrins, starch, xylan, cellulose, hemicellulose, arabinose, glycerol, ethanol, butanol, methanol, or any combination thereof.

77. The method of any one of claims 73 to 76, wherein said carbon substrate is hexanoic acid.

78. The method of any one of claims 73 to 77, wherein said cannabinoid is Δ⁹-tetrahydrocannabinol (THC), cannabidiol (CBD), cannabichromene (CBC), or any combination thereof.

79. The method of any one of claims 73 to 78, wherein the microorganism produces CBGA, and wherein the CBGA is converted to a cannabinoid outside the microorganism.

80. The method of any one of claims 73 to 76, wherein said carbon substrate is butyric acid.

81. The method of any one of claims 73 to 76 and 80, wherein said cannabinoid is Δ⁹-tetrahydrocannabivarinic acid (THCVA), cannabidivarinic acid (CBDVA), cannabichromevarinic acid (CBCVA), or any combination thereof.

82. The method of any one of claims 73 to 76 and 80 to 81, wherein the microorganism produces CBGVA, and wherein the CBGVA is converted to a cannabinoid outside the microorganism.

83. The method of claim 79 or 82, wherein said conversion is a non-enzymatic conversion.

84. The method of claim 79, 82 or 83, wherein said conversion is an enzymatic conversion.

85. The genetically modified organism of claim 29 or 33, wherein said organism comprises a polynucleotide sequence encoding at least one amino acid sequence substantially identical, at least about 75% identical, at least about 80% identical, at least about 85% identical, at least about 90% identical, at least about 91% identical, at least about 92% identical, at least about 93% identical, at least about 94% identical, at least about 95% identical, at least about 96% identical, at least about 97% identical, at least about 98% identical, or at least about 99% identical to a sequence chosen from SEQ ID NO: 153 to SEQ ID NO: 287;
preferably wherein the polynucleotide further encodes a CBDA synthase signal sequence substantially identical to, at least about 75% identical, at least about 80% identical, at least about 85% identical, at least about 90% identical, at least about 91% identical, at least about 92% identical, at least about 93% identical, at least about 94% identical, at least about 95% identical, at least about 96% identical, at least about 97% identical, at least about 98% identical, or at least about 99% identical to a sequence chosen from SEQ ID NO: 44 to SEQ ID NO: 73 or SEQ ID NO: 104 to SEQ ID NO: 110.

86. The genetically modified organism of claim 29 or 33, wherein said organism comprises a polynucleotide sequence encoding at least one amino acid sequence substantially identical, at least about 75% identical, at least about 80% identical, at least about 85% identical, at least about 90% identical, at least about 91% identical, at least about 92% identical, at least about 93% identical, at least about 94% identical, at least about 95% identical, at least about 96% identical, at least about 97% identical, at least about 98% identical, or at least about 99% identical to a sequence chosen from SEQ ID NO: 288 to SEQ ID NO: 297 or SEQ ID NO: 305 to SEQ ID NO: 318.

87. A method of producing CBCA and/or CBDA comprising:
(a) contacting a carbon substrate with the genetically modified microorganism of claim 85 or 86;
(b) growing said genetically modified microorganism to produce said CBCA and/or CBDA.

88. The method of claim 87, further comprising (c) isolating said CBCA and/or CBDA from the genetically modified organism.

89. The method of claim 87 or 88, wherein said carbon substrate is a sugar, alcohol, and/or fatty acid.

90. The method of any one of claims 87 to 89, wherein said carbon substrate is selected from hexanoic acid, butyric acid, glucose, fructose, xylose, sucrose, dextrins, starch, xylan, cellulose, hemicellulose, arabinose, glycerol, ethanol, butanol, methanol, or any combination thereof.

91. The method of any one of claims 87 to 89, wherein said carbon substrate is hexanoic acid.

92. The method of any one of claims 87 to 89, wherein said carbon substrate is butyric acid.

93. The genetically modified organism of claim 29, wherein said organism comprises a polypeptide comprising an amino acid sequence substantially identical, at least about 75% identical, at least about 80% identical, at least about 85% identical, at least about 90% identical, at least about 91% identical, at least about 92% identical, at least about 93% identical, at least about 94% identical, at least about 95% identical, at least about 96% identical, at least about 97% identical, at least about 98% identical, or at least about 99% identical to SEQ ID NO: 27.

94. A method of producing a cannabinoid comprising:
(a) contacting a carbon substrate with the genetically modified microorganism of claim 93;
(b) growing said genetically modified microorganism to produce said cannabinoid.

95. The method of claim 94, further comprising (c) isolating CBCA from the genetically modified organism.

96. The method of claim 94 or 95, wherein said carbon substrate is a sugar, alcohol, and/or fatty acid.

97. The method of any one of claims 94 to 96, wherein said carbon substrate is selected from hexanoic acid, butyric acid, glucose, fructose, xylose, sucrose, dextrins, starch, xylan, cellulose, hemicellulose, arabinose, glycerol, ethanol, butanol, methanol, or any combination thereof.

98. The method of any one of claims 94 to 96, wherein said carbon substrate is hexanoic acid.

99. The method of any one of claims 94 to 96, wherein said carbon substrate is butyric acid.

100. The genetically modified organism of claim 29, wherein said organism comprises a polynucleotide sequence encoding at least one amino acid sequence substantially identical to, at least about 75% identical, at least about 80% identical, at least about 85% identical, at least about 90% identical, at least about 91% identical, at least about 92% identical, at least about 93% identical, at least about 94% identical, at least about 95% identical, at least about 96% identical, at least about 97% identical, at least about 98% identical, or at least about 99% identical to SEQ ID: No. 120; preferably wherein the THCAS is a T446A mutant of SEQ ID NO: 120; a T446V mutant of SEQ ID NO: 120; or a T446I mutant of SEQ ID NO: 120, or a combination thereof.

101. A method of producing THCA comprising:
(a) contacting a carbon substrate with the genetically modified microorganism of claim 100;
(b) growing said genetically modified microorganism to producing THCA.

102. The method of claim 101, further comprising (c) isolating THCA from the genetically modified organism.

103. The method of claim 101 or 102, wherein said carbon substrate is a sugar, alcohol, and/or fatty acid.

104. The method of any one of claims 101 to 103, wherein said carbon substrate is selected from hexanoic acid, butyric acid, glucose, fructose, xylose, sucrose, dextrins, starch, xylan, cellulose, hemicellulose, arabinose, glycerol, ethanol, butanol, methanol, or any combination thereof.

105. The method of any one of claims 101 to 103, wherein said carbon substrate is hexanoic acid.

106. The method of any one of claims 101 to 103, wherein said carbon substrate is butyric acid.

107. The use of a cannabinoid produced by any one of the methods of claims 56 to 84, 87 to 92, 94 to 99, and 101-106 for the manufacture of a medicament for the treatment of a disease or a symptom of a disease.

108. The use of claim 107, wherein said a disease or a symptom of a disease is anorexia, multiple sclerosis, neurodegenerative disorders, epilepsy, glaucoma, osteoporosis, schizophrenia, bipolar disorder, post-traumatic stress disorder (PTSD), asthma, cardiovascular disorders, cancer, obesity, metabolic syndrome-related disorders, depression, anxiety, insomnia, emesis, pain, or inflammation.

109. A medicament comprising a cannabinoid made by any one of the methods of claims 56 to 84, 87 to 92, 94 to 99, and 101-106 and a pharmaceutically acceptable excipient.

110. A method of treating a disease or a symptom of a disease comprising administering a subject in need thereof the cannabinoid made by any one of the methods of claims 56 to 84, 87 to 92, 94 to 99, and 101-106.

111. The method of claim 110, wherein said a disease or a symptom of a disease is anorexia, multiple sclerosis, neurodegenerative disorders, epilepsy, glaucoma, osteoporosis, schizophrenia, bipolar disorder, post-traumatic stress disorder (PTSD), asthma, cardiovascular disorders, cancer, obesity, metabolic syndrome-related disorders, depression, anxiety, insomnia, emesis, pain, or inflammation.

112. A method of treating a disease or a symptom of a disease comprising administering a subject in need thereof the medicament of claim 109.

113. The use of a cannabinoid produced by any one of the microorganisms or methods of claims 1 to 106 for the manufacture of a medicament for recreational use.

114. The use of any one of claims 107, 108 and 113, wherein the medicament is delivered through inhalation, intravenously, oral, or topical.

115. The use of claim 114, wherein the delivery is inhalation and completed through a vaporizer.

116. The use of claim 114, wherein said delivery is intravenous and the medicament is delivered through a saline solution.

117. The use of claim 114, wherein said delivery is oral and the medicament is delivered with food.

118. The use of claim 114, wherein said delivery is oral and the medicament is delivered through drink.

119. The use of claim 114, wherein said delivery is topical and the medicament is delivered through a patch.

120. The use of claim 114, wherein said delivery is topical and the medicament is delivered through a lotion.

121. A genetically modified microorganism comprising at least one polynucleotide encoding for an amino acid sequence that is substantially identical, at least about 75% identical, at least about 80% identical, at least about 85% identical, at least about 90% identical, at least about 91% identical, at least about 92% identical, at least about 93% identical, at least about 94% identical, at least about 95% identical, at least about 96% identical, at least about 97% identical, at least about 98% identical, or at least about 99% identical to a sequence chosen from SEQ ID NO: 320 to SEQ ID NO: 379, a K239A+I240V+L241A combination mutant of SEQ ID NO: 320; a N242D mutant of SEQ ID NO: 320; a N24Q mutant of SEQ ID NO: 320; a G244L+H245K mutant of SEQ ID NO: 320; a K249R mutant of SEQ ID NO: 320; a C264S mutant of SEQ ID NO: 320; a F272I mutant of SEQ ID NO: 320; a R275P mutant of SEQ ID NO: 320; a R275K mutant of SEQ ID NO: 320; a M283I mutant of SEQ ID NO: 320; a M283C+W284F mutant of SEQ ID NO: 320; a F287L mutant of SEQ ID NO: 320; a S295C mutant of SEQ ID NO: 320; a F298G mutant of SEQ ID NO: 320; a F309I mutant of SEQ ID NO: 320; a I314V mutant of SEQ ID NO: 320; a S323A mutant of SEQ ID NO: 320; a S323T mutant of SEQ ID NO: 320; a M326I mutant of SEQ ID NO: 320, a E329Q mutant of SEQ ID NO: 320; a I333L mutant of SEQ ID NO: 320; a L343F mutant of SEQ ID NO: 320; a K348G mutant of SEQ ID NO: 320; a K350N mutant of SEQ ID NO: 320; a L354F mutant of SEQ ID NO: 320; a L354V+F355Y+V356I mutant of SEQ ID NO: 320; a F357Y mutant of SEQ ID NO: 320; a I360C mutant of SEQ ID NO: 320, a F361L mutant of SEQ ID NO: 320; a I363L mutant of SEQ ID NO: 320; a I374L mutant of SEQ ID NO: 320; a Q378K mutant of SEQ ID NO: 320; a T382A mutant of SEQ ID NO: 320; a S398V mutant of SEQ ID NO: 320, a S398V mutant of SEQ ID NO: 320; a T402S mutant of SEQ ID NO: 320; a S417T mutant of SEQ ID NO: 320; a A421L mutant of SEQ ID NO: 320; a M426F mutant of SEQ ID NO: 320, a M428L mutant of SEQ ID NO: 320; a V447+V450I mutant of SEQ ID NO: 320; a S448T mutant of SEQ ID NO: 320; a V450L mutant of SEQ ID NO: 320; a T460S+F461W+V462L mutant of SEQ ID NO: 320, a V473A mutant of SEQ ID NO: 320; a S476L mutant of SEQ ID NO: 320; a W481M mutant of SEQ ID NO: 320; a V484A mutant of SEQ ID NO: 320; a V484L+I489V+I491V mutant of SEQ ID NO: 320, a N488S mutant of SEQ ID NO: 320; a I489V mutant of SEQ ID NO: 320; a S493A mutant of SEQ ID NO: 320; a A495I mutant of SEQ ID NO: 320; a F499S mutant of SEQ ID NO: 320, a C500S mutant of SEQ ID NO: 320; a F503Y mutant of SEQ ID NO: 320; a L510K mutant of SEQ ID NO: 320, a Q520S mutant of SEQ ID NO: 320; a I525L mutant of SEQ ID NO: 320; a L527I mutant of SEQ ID NO: 320; or combinations thereof.

122. A method of producing a cannabinoid comprising:
(a) contacting a carbon substrate with the genetically modified microorganism of claim 121;
(b) growing said genetically modified microorganism to produce a cannabinoid; and
optionally (c) isolating the cannabinoid from the genetically modified organism.

123. A polynucleotide encoding for at least one amino acid sequence that is substantially identical, at least about 75% identical, at least about 80% identical, at least about 85% identical, at least about 90% identical, at least about 91% identical, at least about 92% identical, at least about 93% identical, at least about 94% identical, at least about 95% identical, at least about 96% identical, at least about 97% identical, at least about 98% identical, or at least about 99% identical to a sequence chosen from SEQ ID NO: 320 to SEQ ID NO: 379, a K239A+I240V+L241A combination mutant of SEQ ID NO: 320; a N242D mutant of SEQ ID NO: 320; a N24Q mutant of SEQ ID NO: 320; a G244L+H245K mutant of SEQ ID NO: 320; a K249R mutant of SEQ ID NO: 320; a C264S mutant of SEQ ID NO: 320; a F272I mutant of SEQ ID NO: 320; a R275P mutant of SEQ ID NO: 320; a R275K mutant of SEQ ID NO: 320; a M283I mutant of SEQ ID NO: 320; a M283C+W284F mutant of SEQ ID NO: 320; a F287L mutant of SEQ ID NO: 320; a S295C mutant of SEQ ID NO: 320; a F298G mutant of SEQ ID NO: 320; a F309I mutant of SEQ ID NO: 320; a I314V mutant of SEQ ID NO: 320; a S323A mutant of SEQ ID NO: 320; a S323T mutant of SEQ ID NO: 320; a M326I mutant of SEQ ID NO: 320, a E329Q mutant of SEQ ID NO: 320; a I333L mutant of SEQ ID NO: 320; a L343F mutant of SEQ ID NO: 320; a K348G mutant of SEQ ID NO: 320; a K350N mutant of SEQ ID NO: 320; a L354F mutant of SEQ ID NO: 320; a L354V+F355Y+V356I mutant of SEQ ID NO: 320; a F357Y mutant of SEQ ID NO: 320; a I360C mutant of SEQ ID NO: 320, a F361L mutant of SEQ ID NO: 320; a I363L mutant of SEQ ID NO: 320; a I374L mutant of SEQ ID NO: 320; a Q378K mutant of SEQ ID NO: 320; a T382A mutant of SEQ ID NO: 320; a S398V mutant of SEQ ID NO: 320, a S398V mutant of SEQ ID NO: 320; a T402S mutant of SEQ ID NO: 320; a S417T mutant of SEQ ID NO: 320; a A421L mutant of SEQ ID NO: 320; a M426F mutant of SEQ ID NO: 320, a M428L mutant of SEQ ID NO: 320; a V447+V450I mutant of SEQ ID NO: 320; a S448T mutant of SEQ ID NO: 320; a V450L mutant of SEQ ID NO: 320; a T460S+F461W+V462Lmutant of SEQ ID NO: 320, a V473A mutant of SEQ ID NO: 320; a S476L mutant of SEQ ID NO: 320; a W481M mutant of SEQ ID NO: 320; a V484A mutant of SEQ ID NO: 320; a V484L+I489V+I491V mutant of SEQ ID NO: 320, a N488S mutant of SEQ ID NO: 320; a I489V mutant of SEQ ID NO: 320; a S493A mutant of SEQ ID NO: 320; a A495I mutant of SEQ ID NO: 320; a F499S mutant of SEQ ID NO: 320, a C500S mutant of SEQ ID NO: 320; a F503Y mutant of SEQ ID NO: 320; a L510K mutant of SEQ ID NO: 320, a Q520S mutant of SEQ ID NO: 320; a I525L mutant of SEQ ID NO: 320; a L527I mutant of SEQ ID NO: 320; or combinations thereof.

124. A vector comprising the polynucleotide of claim 123.

125. A polypeptide comprising an amino acid sequence that is substantially identical, at least about 75% identical, at least about 80% identical, at least about 85% identical, at least about 90% identical, at least about 91% identical, at least about 92% identical, at least about 93% identical, at least about 94% identical, at least about 95% identical, at least about 96% identical, at least about 97% identical, at least about 98% identical, or at least about 99% identical to a sequence chosen from SEQ ID NO: 320 to SEQ ID NO: 379, a K239A+I240V+L241A combination mutant of SEQ ID NO: 320; a N242D mutant of SEQ ID NO: 320; a N24Q mutant of SEQ ID NO: 320; a G244L+H245K mutant of SEQ ID NO: 320; a K249R mutant of SEQ ID NO: 320; a C264S mutant of SEQ ID NO: 320; a F272I mutant of SEQ ID NO: 320; a R275P mutant of SEQ ID NO: 320; a R275K mutant of SEQ ID NO: 320; a M283I mutant of SEQ ID NO: 320; a M283C+W284F mutant of SEQ ID NO: 320; a F287L mutant of SEQ ID NO: 320; a S295C mutant of SEQ ID NO: 320; a F298G mutant of SEQ ID NO: 320; a F309I mutant of SEQ ID NO: 320; a I314V mutant of SEQ ID NO: 320; a S323A mutant of SEQ ID NO: 320; a S323T mutant of SEQ ID NO: 320; a M326I mutant of SEQ ID NO: 320, a E329Q mutant of SEQ ID NO: 320; a I333L mutant of SEQ ID NO: 320; a L343F mutant of SEQ ID NO: 320; a K348G mutant of SEQ ID NO: 320; a K350N mutant of SEQ ID NO: 320; a L354F mutant of SEQ ID NO: 320; a L354V+F355Y+V356I mutant of SEQ ID NO: 320; a F357Y mutant of SEQ ID NO: 320; a I360C mutant of SEQ ID NO: 320, a F361L mutant of SEQ ID NO: 320; a I363L mutant of SEQ ID NO: 320; a I374L mutant of SEQ ID NO: 320; a Q378K mutant of SEQ ID NO: 320; a T382A mutant of SEQ ID NO: 320; a S398V mutant of SEQ ID NO: 320, a S398V mutant of SEQ ID NO: 320; a T402S mutant of SEQ ID NO: 320; a S417T mutant of SEQ ID NO: 320; a A421L mutant of SEQ ID NO: 320; a M426F mutant of SEQ ID NO: 320, a M428L mutant of SEQ ID NO: 320; a V447+V450I mutant of SEQ ID NO: 320; a S448T mutant of SEQ ID NO: 320; a V450L mutant of SEQ ID NO: 320; a T460S+F461W+V462Lmutant of SEQ ID NO: 320, a V473A mutant of SEQ ID NO: 320; a S476L mutant of SEQ ID NO: 320; a W481M mutant of SEQ ID NO: 320; a V484A mutant of SEQ ID NO: 320; a V484L+I489V+I491V mutant of SEQ ID NO: 320, a N488S mutant of SEQ ID NO: 320; a I489V mutant of SEQ ID NO: 320; a S493A mutant of SEQ ID NO: 320; a A495I mutant of SEQ ID NO: 320; a F499S mutant of SEQ ID NO: 320, a C500S mutant of SEQ ID NO: 320; a F503Y mutant of SEQ ID NO: 320; a L510K mutant of SEQ ID NO: 320, a Q520S mutant of SEQ ID NO: 320; a I525L mutant of SEQ ID NO: 320; a L527I mutant of SEQ ID NO: 320; or combinations thereof.

126. A genetically modified microorganism comprising at least one polynucleotide encoding for an amino acid sequence that is substantially identical, at least about 75% identical, at least about 80% identical, at least about 85% identical, at least about 90% identical, at least about 91% identical, at least about 92% identical, at least about 93% identical, at least about 94% identical, at least about 95% identical, at least about 96% identical, at least about 97% identical, at least about 98% identical, or at least about 99% identical to a sequence chosen from SEQ ID NO: 153 to SEQ ID NO: 287, or combinations thereof;
preferably wherein the at least one polynucleotide further encodes a CBDA synthase signal sequence substantially identical to, at least about 75% identical, at least about 80% identical, at least about 85% identical, at least about 90% identical, at least about 91% identical, at least about 92% identical, at least about 93% identical, at least about 94% identical, at least about 95% identical, at least about 96% identical, at least about 97% identical, at least about 98% identical, or at least about 99% identical to a sequence chosen from SEQ ID NO: 44 to SEQ ID NO: 73 or SEQ ID NO: 104 to SEQ ID NO: 110,

127. A method of producing CBDA comprising:
(a) contacting a carbon substrate with the genetically modified microorganism of claim 126;
(b) growing said genetically modified microorganism to produce CBDA; and
optionally (c) isolating the CBDA from the genetically modified organism.

128. A polynucleotide encoding for at least one amino acid sequence that is substantially identical, at least about 75% identical, at least about 80% identical, at least about 85% identical, at least about 90% identical, at least about 91% identical, at least about 92% identical, at least about 93% identical, at least about 94% identical, at least about 95% identical, at least about 96% identical, at least about 97% identical, at least about 98% identical, or at least about 99% identical to a sequence chosen from SEQ ID NO: 153 to SEQ ID NO: 287, or combinations thereof;
preferably wherein the at least one polynucleotide further encodes a CBDA synthase signal sequence substantially identical to, at least about 75% identical, at least about 80% identical, at least about 85% identical, at least about 90% identical, at least about 91% identical, at least about 92% identical, at least about 93% identical, at least about 94% identical, at least about 95% identical, at least about 96% identical, at least about 97% identical, at least about 98% identical, or at least about 99% identical to a sequence chosen from SEQ ID NO: 44 to SEQ ID NO: 73 or SEQ ID NO: 104 to SEQ ID NO: 110.

129. A vector comprising the polynucleotide of claim 128.

130. A polypeptide comprising an amino acid sequence that is substantially identical, at least about 75% identical, at least about 80% identical, at least about 85% identical, at least about 90% identical, at least about 91% identical, at least about 92% identical, at least about 93% identical, at least about 94% identical, at least about 95% identical, at least about 96% identical, at least about 97% identical, at least about 98% identical, or at least about 99% identical to a sequence chosen from SEQ ID NO: 153 to SEQ ID NO: 287.

131. A genetically modified microorganism comprising at least one polynucleotide encoding for an amino acid sequence that is substantially identical, at least about 75% identical, at least about 80% identical, at least about 85% identical, at least about 90% identical, at least about 91% identical, at least about 92% identical, at least about 93% identical, at least about 94% identical, at least about 95% identical, at least about 96% identical, at least about 97% identical, at least about 98% identical, or at least about 99% identical to a sequence chosen from SEQ ID NO: 288 to SEQ ID NO: 297 or SEQ ID NO: 305 to SEQ ID NO: 318, or combinations thereof.

132. A method of producing CBCA comprising:
(a) contacting a carbon substrate with the genetically modified microorganism of claim 131;
(b) growing said genetically modified microorganism to produce CBCA; and
optionally (c) isolating the CBCA from the genetically modified organism.

133. A polynucleotide encoding for at least one amino acid sequence that is substantially identical, at least about 75% identical, at least about 80% identical, at least about 85% identical, at least about 90% identical, at least about 91% identical, at least about 92% identical, at least about 93% identical, at least about 94% identical, at least about 95% identical, at least about 96% identical, at least about 97% identical, at least about 98% identical, or at least about 99% identical to a sequence chosen from SEQ ID NO: 288 to SEQ ID NO: 297 or SEQ ID NO: 305 to SEQ ID NO: 318, or combinations thereof.

134. A vector comprising the polynucleotide of claim 133.

135. A polypeptide comprising an amino acid sequence that is substantially identical, at least about 75% identical, at least about 80% identical, at least about 85% identical, at least about 90% identical, at least about 91% identical, at least about 92% identical, at least about 93% identical, at least about 94% identical, at least about 95% identical, at least about 96% identical, at least about 97% identical, at least about 98% identical, or at least about 99% identical to a sequence chosen from SEQ ID NO: 288 to SEQ ID NO: 297 or SEQ ID NO: 305 to SEQ ID NO: 318.

136. A genetically modified microorganism comprising at least one polynucleotide encoding for an amino acid sequence that is substantially identical, at least about 75% identical, at least about 80% identical, at least about 85% identical, at least about 90% identical, at least about 91% identical, at least about 92% identical, at least about 93% identical, at least about 94% identical, at least about 95% identical, at least about 96% identical, at least about 97% identical, at least about 98% identical, or at least about 99% identical to a sequence chosen from THCAS is a T446A mutant of SEQ ID NO: 120; a T446V mutant of SEQ ID NO: 120; or a T446I mutant of SEQ ID NO: 120, or combinations thereof;
preferably wherein the at least one polynucleotide encodes a THCAS signal sequence substantially identical to, at least about 75% identical, at least about 80% identical, at least about 85% identical, at least about 90% identical, at least about 91% identical, at least about 92% identical, at least about 93% identical, at least about 94% identical, at least about 95% identical, at least about 96% identical, at least about 97% identical, at least about 98% identical, or at least about 99% identical to a sequence chosen from SEQ ID NO: 121 to SEQ ID NO: 138.

137. A method of producing THCA comprising:
(a) contacting a carbon substrate with the genetically modified microorganism of claim 136;
(b) growing said genetically modified microorganism to producing THCA; and
optionally (c) isolating the THCA from the genetically modified organism.

138. A polynucleotide encoding for at least one amino acid sequence that is substantially identical, at least about 75% identical, at least about 80% identical, at least about 85% identical, at least about 90% identical, at least about 91% identical, at least about 92% identical, at least about 93% identical, at least about 94% identical, at least about 95% identical, at least about 96% identical, at least about 97% identical, at least about 98% identical, or at least about 99% identical to a sequence chosen from THCAS is a T446A mutant of SEQ ID NO: 120; a T446V mutant of SEQ ID NO: 120; or a T446I mutant of SEQ ID NO: 120, or combinations thereof;
preferably wherein the polynucleotide further encodes a THCAS signal sequence substantially identical to, at least about 75% identical, at least about 80% identical, at least about 85% identical, at least about 90% identical, at least about 91% identical, at least about 92% identical, at least about 93% identical, at least about 94% identical, at least about 95% identical, at least about 96% identical, at least about 97% identical, at least about 98% identical, or at least about 99% identical to a sequence chosen from SEQ ID NO: 121 to SEQ ID NO: 138.

139. A vector comprising the polynucleotide of claim 138.

140. A polypeptide comprising an amino acid sequence that is substantially identical, at least about 75% identical, at least about 80% identical, at least about 85% identical, at least about 90% identical, at least about 91% identical, at least about 92% identical, at least about 93% identical, at least about 94% identical, at least about 95% identical, at least about 96% identical, at least about 97% identical, at least about 98% identical, or at least about 99% identical to a sequence chosen from THCAS is a T446A mutant of SEQ ID NO: 120; a T446V mutant of SEQ ID NO: 120; or a T446I mutant of SEQ ID NO: 120, or combinations thereof.

141. The method of any one of claims 122, 127, 132, or 137, wherein said carbon substrate is a sugar, alcohol, and/or fatty acid.

142. The method of any one of claim 122, 127, 132, 137, or 141, wherein said carbon substrate is selected from hexanoic acid, butyric acid, glucose, fructose, xylose, sucrose, dextrins, starch, xylan, cellulose, hemicellulose, arabinose, glycerol, ethanol, butanol, methanol, or any combination thereof.

143. The method of any one of claim 122, 127, 132, 137, 141, or 142, wherein said carbon substrate is hexanoic acid.

144. The method of any one of claim 122, 127, 132, 137, 141, or 142, wherein said carbon substrate is butyric acid.

145. The use of a cannabinoid produced by any one of the methods of claims 122, 127, 132, 137, or 141 to 144, for the manufacture of a medicament for the treatment of a disease or a symptom of a disease.

146. The use of claim 145, wherein said a disease or a symptom of a disease is anorexia, multiple sclerosis, neurodegenerative disorders, epilepsy, glaucoma, osteoporosis, schizophrenia, bipolar disorder, post-traumatic stress disorder (PTSD), asthma, cardiovascular disorders, cancer, obesity, metabolic syndrome-related disorders, depression, anxiety, insomnia, emesis, pain, or inflammation.

147. A medicament comprising a cannabinoid made by any one of the methods of claims 122, 127, 132, 137, or 141 to 144, and a pharmaceutically acceptable excipient.

148. A method of treating a disease or a symptom of a disease comprising administering a subject in need thereof the cannabinoid made by any one of the methods of claims 122, 127, 132, 137, or 141 to 144.

149. The method of claim 148, wherein said a disease or a symptom of a disease is anorexia, multiple sclerosis, neurodegenerative disorders, epilepsy, glaucoma, osteoporosis, schizophrenia, bipolar disorder, post-traumatic stress disorder (PTSD), asthma, cardiovascular disorders, cancer, obesity, metabolic syndrome-related disorders, depression, anxiety, insomnia, emesis, pain, or inflammation.

150. A method of treating a disease or a symptom of a disease comprising administering a subject in need thereof the medicament of claim 147.

151. The use of a cannabinoid produced by any one of the microorganisms or methods of claims 121, 122, 126, 127, 131, 132, 136, 137, or 141 to 144, for the manufacture of a medicament for recreational use.

152. The use of any one of claims 145, 146 and 151, wherein the medicament is delivered through inhalation, intravenously, oral, or topical.

153. The use of claim 152, wherein the delivery is inhalation and completed through a vaporizer.

154. The use of claim 152, wherein said delivery is intravenous and the medicament is delivered through a saline solution.

155. The use of claim 152, wherein said delivery is oral and the medicament is delivered with food.

156. The use of claim 152, wherein said delivery is oral and the medicament is delivered through drink.

157. The use of claim 152, wherein said delivery is topical and the medicament is delivered through a patch.

158. The use of claim 152, wherein said delivery is topical and the medicament is delivered through a lotion.

159. The genetically modified microorganism of any one of claims 121, 126, 131, and 136, wherein said microorganism is a bacterium or a yeast.

160. The genetically modified microorganism of any one of claims 121, 126, 131, 136, and 159 wherein said microorganism is a yeast.

161. The genetically modified microorganism of claim 160, wherein said yeast is from the genus Saccharomyces.

162. The genetically modified microorganism of claim 160 or 161, wherein said yeast is from the species Saccharomyces cerevisiae.

163. The genetically modified microorganism of any one of claims 121, 126, 131, 136, and 159-162 further comprising at least one polynucleotide encoding at least one polypeptide with acyl activating activity; polyketide synthase activity; olivetol synthase activity; tetraketide synthase activity; olivetolic acid cyclase activity; THCA synthase activity; CBDA synthase activity; CBCA synthase activity; HMG-Co reductase activity; farnesyl pyrophosphate synthetase activity; or any combination thereof.

164. The genetically modified microorganism of any one of claims 121, 126, 131, 136, and 159-163 further comprising at least one polynucleotide encoding an acyl activating enzyme (AAE1); a polyketide synthase (PKS), such as a tetraketide synthase (TKS); an olivetolic acid cyclase (OAC); a THCA synthase (THCAS); a CBDA synthase (CBDAS); a CBCA synthase (CBCAS); a HMG-Co reductase (HMG1); a farnesyl pyrophosphate synthetase (ERG20); or any combination thereof;
preferably wherein the AAE1 is substantially identical, at least about 75% identical, at least about 80% identical, at least about 85% identical, at least about 90% identical, at least about 91% identical, at least about 92% identical, at least about 93% identical, at least about 94% identical, at least about 95% identical, at least about 96% identical, at least about 97% identical, at least about 98% identical, or at least about 99% identical to SEQ ID NO: 14;
preferably wherein the TKS is substantially identical, at least about 75% identical, at least about 80% identical, at least about 85% identical, at least about 90% identical, at least about 91% identical, at least about 92% identical, at least about 93% identical, at least about 94% identical, at least about 95% identical, at least about 96% identical, at least about 97% identical, at least about 98% identical, or at least about 99% identical to SEQ ID NO: 41.
preferably wherein the OAC is substantially identical, at least about 75% identical, at least about 80% identical, at least about 85% identical, at least about 90% identical, at least about 91% identical, at least about 92% identical, at least about 93% identical, at least about 94% identical, at least about 95% identical, at least about 96% identical, at least about 97% identical, at least about 98% identical, or at least about 99% identical to SEQ ID NO: 8;
preferably wherein the THCAS is substantially identical, at least about 75% identical, at least about 80% identical, at least about 85% identical, at least about 90% identical, at least about 91% identical, at least about 92% identical, at least about 93% identical, at least about 94% identical, at least about 95% identical, at least about 96% identical, at least about 97% identical, at least about 98% identical, or at least about 99% identical to a sequence chosen from SEQ ID NO: 10 or SEQ ID NO: 120;
preferably wherein the THCAS is a T446A mutant of SEQ ID NO: 120; a T446V mutant of SEQ ID NO: 120; or a T446I mutant of SEQ ID NO: 120;
preferably wherein the polynucleotide encodes a THCAS signal sequence substantially identical to, at least about 75% identical, at least about 80% identical, at least about 85% identical, at least about 90% identical, at least about 91% identical, at least about 92% identical, at least about 93% identical, at least about 94% identical, at least about 95% identical, at least about 96% identical, at least about 97% identical, at least about 98% identical, or at least about 99% identical to a sequence chosen from SEQ ID NO: 121 to SEQ ID NO: 138;
preferably wherein the CBDAS is substantially identical, at least about 75% identical, at least about 80% identical, at least about 85% identical, at least about 90% identical, at least about 91% identical, at least about 92% identical, at least about 93% identical, at least about 94% identical, at least about 95% identical, at least about 96% identical, at least about 97% identical, at least about 98% identical, or at least about 99% identical to SEQ ID NO: 12;
preferably wherein the CBCAS is substantially identical, at least about 75% identical, at least about 80% identical, at least about 85% identical, at least about 90% identical, at least about 91% identical, at least about 92% identical, at least about 93% identical, at least about 94% identical, at least about 95% identical, at least about 96% identical, at least about 97% identical, at least about 98% identical, or at least about 99% identical to SEQ ID NO: 18;
preferably wherein the HMG1 is substantially identical, at least about 75% identical, at least about 80% identical, at least about 85% identical, at least about 90% identical, at least about 91% identical, at least about 92% identical, at least about 93% identical, at least about 94% identical, at least about 95% identical, at least about 96% identical, at least about 97% identical, at least about 98% identical, or at least about 99% identical to SEQ ID NO: 20 or SEQ ID NO: 22;
preferably wherein the ERG20 is substantially identical, at least about 75% identical, at least about 80% identical, at least about 85% identical, at least about 90% identical, at least about 91% identical, at least about 92% identical, at least about 93% identical, at least about 94% identical, at least about 95% identical, at least about 96% identical, at least about 97% identical, at least about 98% identical, or at least about 99% identical to SEQ ID NO: 24.

165. The genetically modified microorganism of any one of claims 121, 126, 131, 136, and 159-164, further comprising at least one polynucleotide encoding an enzyme that is capable of converting olivetolic acid to cannabigerolic acid (“CBGA”).

166. The genetically modified microorganism of any one of claims 121, 126, 131, 136, 162, and and 159-164, further comprising at least one polynucleotide encoding an enzyme that is capable of converting butyric acid to cannabigerolic acid (“CBGVA”).
